(19) United States
(12) Patent Application Publication
(10) Pub. No.: US 2020/0239937 A1
(43) Pub. Date: Jul. 30, 2020

(54) BIOMARKERS FOR DIAGNOSING CONDITIONS

(71) Applicant: The Council of the Queensland Institute of Medical Research, Herston, Queensland (AU)

(72) Inventor: Jason LEE, Herston, Queensland (AU)

(21) Appl. No.: 16/487,798

(22) PCT Filed: Feb. 23, 2018
(86) PCT No.: PCT/AU2018/050156

§ 371 Date: Aug. 21, 2019

(30) Foreign Application Priority Data
Feb. 23, 2017 (AU) 2017900607

(51) Int. Cl. C12Q 1/6809; C12Q 1/6813; C12Q 1/6844; C12Q 1/6886

(52) U.S. Cl. CPC C12Q 1/6809; C12Q 1/6813; G01N 2800/7038; C12Q 1/6886; C12Q 2600/158; C12Q 1/6844

(57) ABSTRACT

Compositions, methods and apparatus for diagnosing and/or monitoring a hypoxic condition by measurement of a hypoxia-associated gene signature can be used for diagnosis including early diagnosis, monitoring, making treatment decisions, or management of subjects suspected of having a disease or condition that is associated with a hypoxic condition (e.g., a hypoxic condition). Nucleic acid and protein biomarkers can be used for specifically determining the likelihood of the presence or absence of a hypoxic condition in a subject.

### FIELD OF THE INVENTION

[0001] This application claims priority to Australian Provisional Application No. 2017900607 entitled “Biomarkers for diagnosing conditions” filed 23 Feb. 2017, the contents of which are incorporated herein by reference in their entirety.

[0002] This invention relates generally to compositions, methods and apparatus for diagnosing and/or monitoring a hypoxic condition by measurement of a hypoxia-associated gene signature. The invention can be used for diagnosis including early diagnosis, monitoring, making treatment decisions, or management of subjects suspected of having a disease or condition that is associated with a hypoxic condition (e.g., a hypoxic condition). More particularly, the present invention relates to nucleic acid and protein biomarkers that are useful for specifically determining the likelihood of the presence or absence of a hypoxic condition in a subject.

### BACKGROUND OF THE INVENTION

[0003] An important micro-environmental factor recognized to influence tumor behavior is hypoxia. In solid tumors, hypoxia occurs as a result of limitation in oxygen diffusion in vascular primary tumors or their metastases. Hypoxia in solid tumors is known to increase the aggressiveness of cancer cells by enhancing proliferative and metastatic potential (Harris, 2002; Semenza, 2003). Persistent hypoxia significantly reduces the efficacy of radiation and chemotherapy and leads to poor outcomes (Vaupel, 2004; Bache, et al., 2008). This is mainly due to the increase in pro-survival genes that suppress apoptosis (Erler et al., 2004), enhance tumor angiogenesis (Semenza, 2000) and the epithelial-to-mesenchymal transition (EMT) (Hill, et al., 2009). Clinical studies have also demonstrated that tumor hypoxia is strongly associated with an enhanced invasiveness (Pennacchietti et al., 2003) and a higher risk to develop metastasis (Chang et al., 2011), mainly considered to be due to the silencing of cell adhesion molecules (CAMs) under this condition (McGary et al., 2002; Lee et al., 2015; Scully et al., 2012).

[0004] Much of the tumor hypoxia research has been centered on examining the transcriptional targets of hypoxia inducible factors (HIFs). HIF-a is a heterodimeric transcription factor that is comprised of an oxygen-regulated a subunit (HIF-1a or HIF-2a) and a constitutively expressed β subunit (HIF-1β) (Ema et al., 1997; Semeza and Wang, 1992). HIF-1α is an oxygen-responsive transcription factor that mediates adaptation to hypoxia (Semenza, 2003; Dewhirst et al., 2008; Poon et al., 2009). In normal oxygen tension, HIF-a is hydroxylated on at least one of the two proline residues by the prolyl-hydroxylase domain (PHDs) containing enzymes (Ivan et al., 2001; Jaakkola et al., 2001). Hydroxylated HIF-a is then recognised by the tumor suppressor von Hippel Lindau protein (pVHL) and subsequently ubiquitinated for degradation by the proteasome (Maxwell et al., 1999; Ohh et al., 2000). As PHDs require oxygen for their enzymatic activity, under low oxygen concentrations, PHD-mediated hydroxylation is inhibited and HIF-a can then translocate to the nucleus, leading to specific target gene expression through binding of HIF-113 to a hypoxia response element (HRE, recognised by the motif RCGTG in which R is either A or G).

[0005] HIF-a activates metabolic and angiogenic genes that allow adaptation to hypoxic condition including Glut-1 and VEGFA (refs). HIF-a is also responsible for gene repression by activating transcriptional repressors such as DEC1 and DEC2 (Yun et al., 2002; Chakrabarti et al., 2004; Ivanov et al., 2007). While some genes are known to be transcriptionally downregulated by the recruitment of these specific repressors, it is increasingly evident that hypoxia-mediated gene repression also occurs independent of these repressive transcription factors. Therefore, not all genes are regulated by HIF-a, suggesting that some HIF-independent pathways may be involved in controlling gene expression in hypoxia.

[0006] G9a or euchromatic histone-lysine methyltransferase 2 (EHMT2) is one of a larger family of enzymes that can methylate histone H3 lysine 9 (H3K9) from an unmodified state to a dimethylated state (H3K9me2). Dimethylation of H3K9 is correlated with gene repression and is used as a marker of genes silenced epigenetically (Tachibana et al., 2005). G9a is frequently over-expressed in several tumor types and its depletion in cancer cells reduces tumor growth and metastasis suggesting that G9a participates in oncogenic and metastatic potential (Chen et al., 2010; Dong et al., 2012; Liu et al., 2015; Zhong et al., 2015; Hua et al., 2014; Wozniak et al., 2007). It has been shown that G9a protein accumulation occurs in hypoxic condition without altering the level of G9a transcript (Chen et al., 2006). However, the mechanism by which G9a exerts its activity on its environment is not well understood and therefore, the ability to use the identification and/or detection of G9a polypeptide in clinical diagnosis has not been possible.

### SUMMARY OF THE INVENTION

[0007] The present invention arises from the determination that certain host response peripheral blood RNA transcripts (RNA markers) are commonly, specifically and differentially expressed and regulated by G9a, particularly in hypoxic conditions. Such RNA transcripts (biomarkers) are useful for diagnosis at an early stage of a disease or condition and over the course of the disease or condition. These biomarkers are useful therefore in early diagnosis, diagnosis, monitoring, prognosis and determination of severity of a G9a-associated disease or condition. In one example, the disease or condition is associated with a hypoxic condition. In particular, based on the demonstrated specificity to hypoxia, such biomarkers are useful in determining the etiology of a disease or condition when caused by a hypoxic condition.

[0008] Based on this determination, the present inventors have developed various methods, apparatus, compositions, and kits, which take advantage of differentially expressed biomarkers, including ratios thereof (derived biomarkers), to determine the presence, absence or degree of G9a-associated disease or condition. in subjects presenting with clinical signs of the G9a-associated disease or condition. In certain embodiments, these methods, apparatus, compositions, and kits represent a significant advance over prior art processes and products, which have not been able to: 1) distinguish from other diseases or conditions that are not associated with aberrant G9a, (including other cancers); and/or 2) determine the contribution of a G9a overexpression (if any) to the presenting clinical signs and pathology of the disease or condition.

[0009] Accordingly, the present invention provides methods for determining an indicator used in assessing a likelihood of the presence or absence of a hypoxic condition (e.g., a hypoxic cancer) in a subject, the method comprising, consisting or consisting essentially of: (1) determining a biomarker value that is measured or derived for at least one hypoxia biomarker (e.g., 1, 2, 3, 4, 5, 6, 7, 8, 9 or 10 hypoxia biomarkers) in a sample obtained from the subject, wherein the at least one hypoxia biomarker is selected from ARNTL, CD1C, HHEX, KLRG1, MMP16, FGFR2, GATA2, CEACAM7, OGN, and AGTR1; and (2) determining the indicator using the biomarker value(s), wherein the indicator is at least partially indicative of the likelihood of the presence or absence of the hypoxic condition in the subject.

[0010] Non-limiting examples of nucleotide sequences for these hypoxia biomarkers are listed in SEQ ID NOs: 1-10 (see, Table 5). Non-limiting examples of amino acid sequences for these hypoxia biomarkers are listed in SEQ ID NOs: 202-211 (see, Table 6). In illustrative examples, an individual hypoxia biomarker is selected from the group consisting of: (a) a polynucleotide expression product comprising a nucleotide sequence that shares at least 70% (or at least 71% to at least 99% and all integer percentages in between) sequence identity with the sequence set forth in any one of SEQ ID NO: 1-10, or a complement thereof; (b) a polynucleotide expression product comprising a nucleotide sequence that encodes a polypeptide comprising the amino acid sequence set forth in any one of SEQ ID NO: 202-211; (c) a polynucleotide expression product comprising a nucleotide sequence that encodes a polypeptide that shares at least 70% (or at least 71% to at least 99% and all integer percentages in between) sequence similarity or identity with at least a portion of the sequence set forth in SEQ ID NO: 202-211; (d) a polynucleotide expression product comprising a nucleotide sequence that hybridizes to the sequence of (a), (b), (c) or a complement thereof, under medium or high stringency conditions; (e) a polypeptide expression product comprising the amino acid sequence set forth in any one of SEQ ID NO: 202-211; and (f) a polypeptide expression product comprising an amino acid sequence that shares at least 70% (or at least 71% to at least 99% and all integer percentages in between) sequence similarity or identity with the sequence set forth in any one of SEQ ID NO: 202-211.

[0011] Another aspect of the present invention provides methods for determining an indicator used in assessing malignancy of a tumor present in a subject, the method comprising, consisting, or consisting essentially of: (1) determining a biomarker value that is measured or derived for at least one hypoxia biomarker (e.g., 1, 2, 3, 4, 5, 6, 7, 8, 9 or 10 hypoxia biomarkers) in a sample obtained from the subject, wherein the at least one hypoxia biomarker is selected from ARNTL, CD1C, HHEX, KLRG1, MMP16, FGFR2, GATA2, CEACAM7, OGN, and AGTR1; and (2) determining the indicator using the biomarker value(s), wherein the indicator is at least partially indicative of the malignancy of the tumor.

[0012] One advantage of such methods, is that the hypoxia biomarkers may be detectable in the sample before the clinical signs of malignancy are observed. Thus, the present invention allows for the early detection of the likelihood of tumor malignancy, which is generally understood to correlate with increased survival rates of a subject.

[0013] Yet another aspect of the present invention provides methods for determining an indicator used in predicting a likelihood of cancer recurrence in a subject, the method comprising, consisting, or consisting essentially of: (1) determining a biomarker value that is measured or derived for at least one hypoxia biomarker (e.g., 1, 2, 3, 4, 5, 6, 7, 8, 9 or 10 hypoxia biomarkers) in a sample obtained from the subject, wherein the at least one hypoxia biomarker is selected from ARNTL, CD1C, HHEX, KLRG1, MMP16, FGFR2, GATA2, CEACAM7, OGN, and AGTR1; and (2) determining the indicator using the biomarker value(s), wherein the indicator is at least partially indicative of the likelihood of cancer recurring in the subject.

[0014] In another aspect, the present invention provides methods for reducing hypoxia in a subject, the method comprising, consisting or consisting essentially of: (1) determining a biomarker value that is measured or derived for at least one hypoxia biomarker (e.g., 1, 2, 3, 4, 5, 6, 7, 8, 9, or 10 hypoxia biomarkers) in a sample obtained from the subject, wherein the at least one hypoxia biomarker is selected from FGFR2, GATA2, CEACAM7, ARNTL, CD1C, KLRG1, OGN, MMP16, HHEX, and AGTR1; (2) determining an indicator using the biomarker value(s); and (3) administering an effective amount of a G9a antagonist to the subject on the basis that the indicator is at least partially indicative of the likelihood of the presence of hypoxia in the subject.

[0015] In a further aspect, the present invention provides methods for treating a hypoxic condition (e.g., a hypoxic cancer) in a subject, the method comprising, consisting, or consisting essentially of: (1) determining a biomarker value that is measured or derived for at least one hypoxia biomarker (e.g., 1, 2, 3, 4, 5, 6, 7, 8, 9 or 10 hypoxia biomarkers) in a sample obtained from the subject, wherein the at least one hypoxia biomarker is selected from ARNTL, CD1C, HHEX, KLRG1, MMP16, FGFR2, GATA2, CEACAM7, OGN, and AGTR1; (2) determining an indicator using the biomarker value(s); and (3) administering an effective amount of a G9a antagonist to the subject on the basis that the indicator is at least partially indicative of the likelihood of the presence of the hypoxic condition in the subject.

[0016] Yet another aspect of the present invention provides methods of reducing the malignancy of a hypoxic tumor in a subject, the method comprising, consisting, or consisting essentially of: (1) determining a biomarker value that is measured or derived for at least one hypoxia biomarker (e.g., 1, 2, 3, 4, 5, 6, 7, 8, 9, or 10 hypoxia biomarkers) in a sample obtained from the subject, wherein the at least one hypoxia biomarker is selected from ARNTL, CD1C, HHEX, KLRG1, MMP16, FGFR2, GATA2, CEACAM7, OGN, and AGTR1; (2) determining an indicator using the biomarker value(s); and (3) administering an effective amount of a G9a antagonist to the subject on the basis that the indicator is at least partially indicative of the likelihood that the tumor is hypoxic.

[0017] In another aspect, the present invention provides methods for treating a hypoxic tumor in a subject, the method comprising, consisting, or consisting essentially of: (1) determining a biomarker value that is measured or derived for at least one hypoxia biomarker (e.g., 1, 2, 3, 4, 5, 6, 7, 8, 9, or 10 hypoxia biomarkers) in sample obtained from the subject, wherein the at least one hypoxia biomarker is selected from ARNTL, CD1C, HHEX, KLRG1, MMP16, FGFR2, GATA2, CEACAM7, OGN, and AGTR1; and (2) determining an indicator using the biomarker value(s); and (3) administering an effective amount of a G9a antagonist to the subject on the basis that the indicator is at least partially indicative of the likelihood that the tumor is hypoxic.

[0018] Suitably, the sample is a biological sample, for example a biological sample comprising cancer or tumor cells.

[0019] In some embodiments, the subject is administered with an ancillary treatment.

[0020] For example, the subject may be administered with a G9a antagonist together with chemotherapy and/or radiotherapy treatment.

[0021] The at least one hypoxia biomarker is suitably selected from the group consisting of: (a) a polynucleotide expression product comprising a nucleotide sequence that shares at least 70% (or at least 71% to at least 99% and all integer percentages in between) sequence identity with the sequence set forth in any one of SEQ ID NO: 1-10, or a complement thereof; (b) a polynucleotide expression product comprising a nucleotide sequence that encodes a polypeptide comprising the amino acid sequence set forth in any one of SEQ ID NO: 202-211; (c) a polynucleotide expression product comprising a nucleotide sequence that encodes a polypeptide that shares at least 70% (or at least 71% to at least 99% and all integer percentages in between) sequence similarity or identity with at least a portion of the sequence set forth in SEQ ID NO: 202-211; (d) a polynucleotide expression product comprising a nucleotide sequence that hybridizes to the sequence of (a), (b), (c) or a complement thereof, under medium or high stringency conditions; (e) a polypeptide expression product comprising the amino acid sequence set forth in any one of SEQ ID NO: 202-211; and (f) a polypeptide expression product comprising an amino acid sequence that shares at least 70% (or at least 71% to at least 99% and all integer percentages in between) sequence similarity or identity with the sequence set forth in any one of SEQ ID NO: 202-211.

[0022] In some embodiments, the biomarker value is at least partially indicative of a concentration of the at least one hypoxia biomarker in the sample obtained from the subject. In some of the same embodiments and other embodiments, the biomarker value is at least partially indicated of the level of gene expression of the at least one hypoxia biomarker in the sample obtained from the subject. Suitably, the biomarker value includes the abundance of the biomarker.

[0023] In some embodiments, the level of the at least one hypoxia biomarker is reduced relative to the level of the biomarker that correlates with the presence of normal (i.e., non-hypoxic) conditions, and the indicator is thereby determined to be at least partially indicative of a hypoxia.

[0024] In some embodiments, the level of the at least one hypoxia biomarker is about the same as the level of the biomarker that correlates with the presence of normal (i.e., non-hypoxic) conditions, and the indicator is determined to be at least partially indicative of a normoxia.

[0025] In some embodiments, methods for determining an indicator used in assessing a likelihood of the presence or absence of a hypoxic condition (e.g., a hypoxic cancer) in a subject, the method comprising, consisting or consisting essentially of: (1) determining a biomarker value that is measured or derived for at least one group 1 hypoxia biomarker (e.g., 1, 2, 3, 4, 5, 6, 7, 8, 9 or 10 hypoxia biomarkers) in a sample obtained from the subject, wherein the at least one hypoxia biomarker is selected from ARNTL, CD1C, HHEX, KLRG1, MMP16, FGFR2, GATA2, CEACAM7, OGN, and AGTR1; (2) determining a biomarker value that is measured or derived for a group 2 hypoxia biomarker, wherein the group 2 hypoxia biomarker is G9a; and (3) determining the indicator using the biomarker values, wherein the indicator is at least partially indicative of the likelihood of the presence or absence of the hypoxic condition in the subject. Suitably, the methods further comprises applying a combining function to the at least one group 1 hypoxia biomarker value(s) and the group 2 hypoxia biomarker.

[0026] In some embodiments, wherein the indicator is a ratio of the biomarker values recorded on the group 1 hypoxia biomarker and the group 2 hypoxia biomarkers.

[0027] In the methods disclosed above and elsewhere herein, the biomarker value(s) is (are) measured using any suitable technique known in the art. For example, suitable measurements may be performed using any one or more of microscopy, flow cytometry, immunoassays, mass spectrometry, sequencing platforms, array and hybridization platforms, or a combination thereof.

[0028] In another aspect, the present invention provides compositions for determining an indicator used in assessing a likelihood of a subject having a hypoxic condition (e.g., hypoxic cancer). These compositions generally comprise, consist, or consist essentially of at least one cDNA and at least one oligonucleotide primer or probe that hybridizes to the cDNA, wherein the at least one cDNA is a selected from ARNTL, CD1C, HHEX, KLRG1, MMP16, FGFR2, GATA2, CEACAM7, OGN, and AGTR1. Suitably, the compositions comprise a population of cDNAs corresponding to mRNA derived from a cell or cell population. In some embodiments, the cell is a cell of suspected of a hypoxic condition, suitably a cancer or tumor cell. In some embodiments, the cell population is blood, suitably peripheral blood. In some embodiments, the at least one oligonucleotide primer or probe is hybridized to an individual one of the cDNAs. In any of the above embodiments, the composition may further comprise a labeled reagent for detecting the cDNA. In illustrative examples of this type, the labeled reagent is a labeled said at least one oligonucleotide primer or probe. In other embodiments, the labeled reagent is a labeled said cDNA. Suitably, the at least one oligonucleotide primer or probe is in a form other than a high density array. In non-limiting examples of these embodiments, the compositions comprise labeled reagents for detecting and/or quantifying no more than 4, 5, 6, 7, 8, 9, 10, 15, 20, 30, 40 or 50 different hypoxia biomarker cDNAs. In specific embodiments, the compositions comprise for a respective cDNA, (1) two oligonucleotide primers (e.g., nucleic acid amplification primers) that hybridize to opposite complementary strands of the cDNA, and (2) an oligonucleotide probe that hybridizes to the cDNA. In some embodiments, one or both of the oligonucleotide primers are labeled. In some embodiments, the oligonucleotide probe is labeled. In illustrative examples, the oligonucleotide primers are not labeled and the oligonucleotide probe is labeled. Suitably, in embodiments in which the oligonucleotide probe is labeled, the labeled oligonucleotide probe comprises a fluorophore. In representative examples of this type, the labeled oligonucleotide probe further comprises a quencher. In certain embodiments, different labeled oligonucleotide probes are included in the composition for hybridizing to different cDNAs, wherein individual oligonucleotide probes comprise detectably distinct labels (e.g. different fluorophores).

[0029] In still another aspect, the present invention provides complexes comprising, consisting, or consisting essentially of at least one cDNA and at least one oligonucleotide primer or probe that hybridizes to the cDNA, wherein the at least one cDNA is a selected from ARNTL, CD1C, HHEX, KLRG1, MMP16, FGFR2, GATA2, CEACAM7, OGN, and AGTR1. These compositions generally comprise, consist or consist essentially of at least one pair of cDNAs and at least one oligonucleotide primer or probe that hybridizes to an individual one of the cDNAs. Suitably, the compositions comprise a population of cDNAs corresponding to mRNA derived from a cell or cell population. In some embodiments, the cell is a cell of the immune system, suitably a leukocyte. In some embodiments, the cell population is blood, suitably peripheral blood. In some embodiments, the at least one oligonucleotide primer or probe is hybridized to an individual one of the cDNAs. In any of the above embodiments, the composition may further comprise a labeled reagent for detecting the cDNA. In illustrative examples of this type, the labeled reagent is a labeled said at least one oligonucleotide primer or probe. In other embodiments, the labeled reagent is a labeled said cDNA. Suitably, the at least one oligonucleotide primer or probe is in a form other than a high density array. In some embodiments, the cell is a cell of a cancer or tumor.

[0030] In other examples of these embodiments and other embodiments, the at least one oligonucleotide primer or probe is hybridized to an individual one of the cDNAs. Suitably, the composition or complex further comprises a labelled reagent for detecting the cDNAs. For example, in some embodiments, the labelled reagent is at least one oligonucleotide primer or probe. In some embodiments, the labelled reagent is a labelled said cDNA. In some of the same embodiments and other embodiments, the at least one oligonucleotide primer or probe is in a form other than a high density array.

[0031] In yet another aspect, the present invention provides a kit for determining an indicator indicative of the likelihood of hypoxia in a subject, the kit comprising, consisting, or consisting essentially of, (a) at least one reagent that allows quantification of a hypoxia biomarker;

[0032] and optionally (b) instructions for using the at least one reagent.

### BRIEF DESCRIPTION OF THE DRAWINGS

[0033] FIG. 1 is a photographical representation of G9a nuclear accumulation in hypoxic condition. (A) Immunoblotting analysis of G9a in nuclear extracts from MCF7 and MDA-MB-231 (MDA231) breast cancer cells exposed to normoxic and hypoxic conditions as indicated. HIF-1a levels were used as a marker of hypoxic response and Lamin A/C was used as a loading control. (B) Immunoblotting analysis of GLP and Suv39h1 in nuclear extracts from MCF7 cells exposed to normoxic and hypoxic conditions. (C) G9a transcript levels analyzed by qRT-PCR from RNA isolated from MCF7 cells exposed to hypoxic conditions as indicated. Results are expressed as relative mRNA levels compared to 0 hr (normoxia). (D) G9a immunoblotting was performed on nuclear extracts from MCF7 cells exposed to normoxic or hypoxic conditions for 9 hrs in the presence or absence of 20 μM proteasomal inhibitor, MG132. (E and F) Protein extracts from MCF7 cells transfected with His tagged-ubiquitin, exposed to normoxia or hypoxia (E) and DMOG treatment (1 mM) (F) as indicated were subjected to pull-down with Ni²⁺-NTA beads and immunoblotted for G9a. (G) G9a immunoblotting was performed on nuclear extracts from MCF7 and MDA231 cells treated with prolyl hydroxylase inhibitor (DMOG, 1 mM) for indicated times. (H) Immunoblotting of G9a from MCF7 and MDA231 cells in the presence or absence of 100 μM hypoxia-mimicking agent, Deferoxamine (DFA). Lamin A/C was used as loading control.

[0034] FIG. 2 is a photographical representation of the mechanism of G9a stabilisation under hypoxic stress. (A) MCF7 cells were transfected with the indicated expression plasmids in the presence of MG132 (20 μM), and immunoprecipitation was performed using anti-Flag antibody and immunoblotted using antibodies indicated. (B) G9a proline hydroxylation was determined in MCF7 cells overexpressing GFP-tagged PHD1, PHD2 or PHD3 in the presence of MG132 (20 μM). Immunoprecipitation of hydroxylated G9a was performed using anti-hydroxyproline antibody followed by immunoblotting with anti-Flag antibody. (C) Immunoprecipitation of proline hydroxylated G9a with anti-hydroxyproline antibody from MCF7 cells overexpressing Flag-tagged G9a either exposed to normoxia or hypoxia in the presence of MG132 (20 μM). (D and E) Interaction between G9a and pVHL was determined from MCF7 cells transfected with the indicated expression plasmids in normoxic or hypoxic conditions, and immunoprecipitation was performed using anti-Flag antibody (D) or cells treated with or without DMOG, immunoprecipitated with anti-HA (E) and immunoblotted using antibodies indicated. (F) Immunoblotting analysis of G9a in nuclear extracts from either RCC4 renal cell carcinoma cell line or overexpressing wild type pVHL exposed to normoxic and hypoxic conditions as indicated. (G) Immunoblotting analysis of G9a, in nuclear extracts from G9a^{-/-} MEFs reconstituted with G9a WT and P2A mutant exposed to normoxic and hypoxic conditions as indicated. (H) Immunoprecipitation of hydroxylated G9a with anti-hydroxyproline antibody from MCF7 cells overexpressing Flag-tagged G9a WT or P2A mutant either exposed to normoxia or hypoxia in the presence of MG132 (20 μM).

[0035] FIG. 3 shows graphical and schematic representations of the expression and prognostication of the hypoxia biomarker genes across breast cancer subtypes. (A) Hierarchical clustering of differentially expressed genes comparing fold change of hypoxia-responsive genes from MCF7 cells expressing shNS and shG9a. Upregulated and downregulated gene clusters are represented as red and green, respectively. (B) Diagram showing the strategy of cDNA microarray analysis and G9a-dependent gene selection process. (C) hypoxia biomarker gene signature; list of the 10 genes associated with relapse-free survival identified from FIG. 4 with a heat-map representing relative expression from the microarray analysis. (D) The average expression of the 10 G9a-suppressed genes was analyzed for association with relapse-free survival as a gene signature. The breast cancer cases in each of the three datasets (KM plotter, ROCK and TCGA) were allocated to one of four quartiles based on the G9a-suppressed gene signature and the survival of these patients were compared. The number of patients in each subgroup is shown in brackets and the hazard ratio (HR) and the log-rank P values for survival comparison between the quartile 1 group (bottom 25%) and the other groups is also shown in each panel. (G and H) Relapse-free survival analysis of breast cancer patients between tumors with the lowest expression (bottom 25%, quartile 1) to the rest of the tumors is shown using the G9a-suppressed gene signature in the different breast cancer subtypes from the KM plotter database. ER-positive and ER-negative (E) and Luminal A, Luminal B, HER2-enriched and Basal-like (F).

[0036] FIG. 4 is a schematic representation of the identification of G9a-associated genes. The hypoxia biomarker gene set from the microarray analysis was filtered for its inverse relationship with G9a and HIF target gene expression (left-hand circles in first step represent those genes that are inversely correlated to G9a; and right-hand circles represent those genes that are inversely correlated to hypoxia). Notably, 44 genes in each of the ER-positive and ER-negative groups identified were analyzed for commonality between the three datasets. 10 genes in each of the ER-positive and ER-negative groups were identified. Out of the 20 genes combined, 14 distinct genes were present (with 10 genes being associated with relapse-free survival).

[0037] FIG. 5 is a graphical representation of the molecular analysis of G9a inhibition in gene expression. (A) Quantitative RT-PCR analysis of the 10 hypoxia biomarker genes identified from FIG. 3 following UNC0642 treatment. Results are expressed as relative mRNA levels compared to vehicle treatment under normoxic (white boxes) or hypoxic (black boxes) conditions. (B) ChIP analysis of G9a, H3K9me2 and Pol II on AGTR1 and ARNTL promoters in MCF7 cells treated with 3 μM UNC0642 in normoxic or hypoxic conditions. (C) The shRNA-coupled ChIP assay on AGTR1 and ARNTL promoters in MCF7 cells in normoxia and hypoxia. Promoter occupancy by G9a, H3K9me2 and RNA polymerase II was analyzed. Values are expressed as mean±SEM. Statistical differences were determined by unpaired t-test (*P<0.05, **P<0.01), n=3.

[0038] FIG. 6 shows graphical and schematic representations of functional activity of G9a and G9a-dependent genes. (A) Top molecular and cellular functions altered in shG9a MCF7 cells in hypoxia include cellular development, growth and proliferation (p-value ranges: cell-to-cell signalling and interaction=8.10×10⁻³ to 2.07×10⁻⁶; cellular growth and proliferation=8.10×10⁻³ to 2.70×10⁻⁶; carbohydrate metabolism=8.10×10⁻³ to 4.22×10⁻⁵; cellular development=8.10×10⁻³ to 4.39×10⁻⁵; cellular function and maintenance=8.10×10⁻³ to 4.91×10⁻⁵). (B) Functional annotation network analysis as part of Ingenuity Pathway analysis revealed that downregulation of seven genes out of 10 genes in the hypoxia biomarker gene signature are predicted to inhibit organismal death (P=2.16×10⁻³) (i.e., upregulation of hypoxia biomarker gene signature promotes organismal death). Red shapes represent upregulated genes, green shapes represent downregulated genes, and dashed lines represent predicted inhibition. (C) Immunoblotting analysis of G9a in nuclear extracts from various breast epithelial cells as shown. Histone H3 levels were used as a loading control. (D) Cell survival was analyzed by performing MTT assay on cells examined in FIG. 6C following vehicle (black boxes) or G9a inhibitor (UNC0642 at 5 μM; clear boxes) treatment. (E) IncuCyte ZOOM time-lapse imaging analysis for MCF7 treated with various concentrations of UNC0642 as indicated. (D and E) Cell survival analyzed by performing MTT assay on MCF7 and MDA231 cells following vehicle or G9a inhibitor (UNC0642) treatment in normoxia (clear circles: vehicle; grey circles: UNC0642 1 μM; grey triangles: UNC0642 2 μM; and black squares: UNC0642 3 μM).

[0039] FIG. 7 is a photographical representation of the impact of G9a on cell motility. (A) Immunoblotting analysis of H3K9me2 in nuclear extracts from MCF7 cells following either vehicle or UNC0642 treatment for 6 hrs. Lamin A/C levels were used as a loading control. (B) Scratch wound assay for MCF7 cells, under both normoxic (21% 02) and hypoxic (1% 02) conditions. Results were evaluated by real-time imaging performed by the IncuCyte Zoom every 24 hours. Scale bars correspond to 700 μm, 10× magnification. (C) Scratch wound assay of MDA231 in normoxic (21% 02) and hypoxic (1% 02) conditions, grown in the presence or in the absence of G9a inhibitor. Scale bar 700 μm, 10× magnification. (D) Photomicrographs from a scratch wound assay of MCF7 cells expressing either shNS orshG9a, in hypoxia for the indicated times. Scale bars correspond to 1000 μm, 4× magnification.

[0040] FIG. 8 is a cartoon and graphical representation of the effect of G9a inhibition on tumor growth in vivo. (A) Diagram showing the design of the in vivo tumor growth study. (B) Groups of B6 wild-type (WT) mice (n=6-9) were subcutaneously injected with AT3 tumor (1×10⁶ cells) on day 0. Tumor-bearing mice were treated with 5 mg/kg UNC0642 intraperitoneally every two days. Tumor growth was measured using a digital caliper, and tumor volumes are represented as mean±SEM. Statistical differences in tumor volumes between vehicle and UNC0642-treated mice were determined by unpaired t-test (* P<0.05), n=3. (C) Tumor volume at end-point shown for vehicle and UNC0642-treated mice, represented as mean±SEM.

[0041] FIG. 9 is a graphical representation of the diagnosis and prognosis of a range of hypoxic cancers using the identified hypoxia biomarkers. (A) Kidney clear cell carcinoma patient dataset from The Cancer Genome Atlas (TCGA) were divided into quartiles, showing that patients with high expression of the hypoxia biomarkers are associated with a better survival outcome. (B) Lung adenocarcinoma patient dataset from Kaplan Meyer Plotter was divided into low and high groups, demonstrating that patients with high expression of the hypoxia biomarkers are associated with a better survival outcome. (C) Prognostic value of G9a assessed in melanoma. Patients grouped into a quartile based on the expression of a G9a transcript (Hazard ratio=1.773; P=0.0056), which quartile correlates to the overall survival. (D) Patients grouped into a quartile based on the expression of a G9a transcript (Hazard ratio=2.532; P=0.0106), which quartile correlates to the overall survival. (E) Prognostic value of G9a of outcome of patients with metastatic melanoma. The overall survival of patients stratified using G9a expression compared between melanoma patients and metastatic patients. (G) Patients grouped into quartiles based on average expression of a five-gene subset, namely ARNTL, CD1C, HHEX, KLRG1, and MMP16. The overall survival of patients associates with overall survival (OS) and relapse-free survival in melanoma.

### DETAILED DESCRIPTION OF THE INVENTION

### I. Definitions

[0042] Unless defined otherwise, all technical and scientific terms used herein have the same meaning as commonly understood by those of ordinary skill in the art to which the invention belongs. Although any methods and materials similar or equivalent to those described herein can be used in the practice or testing of the present invention, preferred methods and materials are described. For the purposes of the present invention, the following terms are defined below.

[0043] The articles “a” and “an” are used herein to refer to one or to more than one (i.e. to at least one) of the grammatical object of the article. By way of example, “an element” means one element or more than one element.

[0044] The term “about” as used herein refers to the usual error range for the respective value readily known to the skilled person in this technical field. Reference to “about” a value or parameter herein includes (and describes) embodiments that are directed to that value or parameter per se.

[0045] As used herein, “and/or” refers to and encompasses any and all possible combinations of one or more of the associated listed items, as well as the lack of combinations when interpreted in the alternative (or).

[0046] The term “biomarker” broadly refers to any detectable compound, such as a protein, a peptide, a proteoglycan, a glycoprotein, a lipoprotein, a carbohydrate, a lipid, a nucleic acid (e.g., DNA, such as cDNA or amplified DNA, or RNA, such as mRNA), an organic or inorganic chemical, a natural or synthetic polymer, a small molecule (e.g., a metabolite), or a discriminating molecule or discriminating fragment of any of the foregoing, that is present in or derived from a sample. “Derived from” as used in this context refers to a compound that, when detected, is indicative of a particular molecule being present in the sample. For example, detection of a particular cDNA can be indicative of the presence of a particular RNA transcript in the sample. As another example, detection of or binding to a particular antibody can be indicative of the presence of a particular antigen (e.g., protein) in the sample. Here, a discriminating molecule or fragment is a molecule or fragment that, when detected, indicates presence or abundance of an above-identified compound. A biomarker can, for example, be isolated from a sample, directly measured in a sample, or detected in or determined to be in a sample. A biomarker can, for example, be functional, partially functional, or non-functional. In specific embodiments, the “biomarkers” include “hypoxia biomarkers”, which are described in more detail below.

[0047] The term “biomarker value” refers to a value measured or derived for at least one corresponding biomarker of a subject and which is typically at least partially indicative of an abundance or concentration of a biomarker in a sample taken from the subject. Thus, the biomarker values could be measured biomarker values, which are values of biomarkers measured for the subject, or alternatively could be derived biomarker values, which are values that have been derived from one or more measured biomarker values, for example by applying a function to the one or more measured biomarker values. Biomarker values can be of any appropriate form depending on the manner in which the values are determined. For example, the biomarker values could be determined using high-throughput technologies such as mass spectrometry, sequencing platforms, array and hybridization platforms, immunoassays, flow cytometry, or any combination of such technologies and in one preferred example, the biomarker values relate to a level of activity or abundance of an expression product or other measurable molecule, quantified using a technique such as PCR, sequencing or the like. In this case, the biomarker values can be in the form of amplification amounts, or cycle times, which are a logarithmic representation of the concentration of the biomarker within a sample, as will be appreciated by persons skilled in the art and as will be described in more detail below.

[0048] The term “biomarker profile” refers to one or a plurality of one or more types of biomarkers (e.g., an mRNA molecule, a cDNA molecule and/or a protein, etc.), or an indication thereof, together with a feature, such as a measurable aspect (e.g., biomarker value) of the biomarker(s). A biomarker profile may comprise a single biomarker whose level, abundance or amount correlates with the presence or absence of a condition (e.g., hypoxia or normoxia). Alternatively, a biomarker profile may comprise at least two such biomarkers or indications thereof, where the biomarkers can be in the same or different classes, such as, for example, a nucleic acid and a polypeptide. Thus, a biomarker profile may comprise at least 2, 3, 4, 5, 6, 7, 8, 9, 10, 11, 12, 13, 14, 15, 16, 17, 18, 19, 20, 21, 22, 23, 24, 25, 30, 35, 40, 45, 50, 55, 60, 65, 70, 75, 80, 85, 90, 95, or 100 or more biomarkers or indications thereof. In some embodiments, a biomarker profile comprises hundreds, or even thousands, of biomarkers or indications thereof. A biomarker profile can further comprise one or more controls or internal standards. In certain embodiments, the biomarker profile comprises at least one biomarker, or indication thereof, that serves as an internal standard. In other embodiments, a biomarker profile comprises an indication of one or more types of biomarkers. The term “indication” as used herein in this context merely refers to a situation where the biomarker profile contains symbols, data, abbreviations or other similar indicia for a biomarker, rather than the biomarker molecular entity itself. The term “biomarker profile” is also used herein to refer to a biomarker value or combination of at least two biomarker values, wherein individual biomarker values correspond to values of biomarkers that can be measured or derived from one or more subjects, which combination is characteristic of a discrete condition, stage of condition, subtype of condition or a prognosis for a discrete condition, stage of condition, subtype of condition. The term “profile biomarkers” is used to refer to a subset of the biomarkers that have been identified for use in a biomarker profile that can be used in performing a clinical assessment, such as to rule in or rule out a specific condition, different stages or severity of conditions, subtypes of different conditions or different prognoses. The number of profile biomarkers will vary, but is typically of the order of 10 or less.

[0049] The terms “complementary” and “complementarity” refer to polynucleotides (i.e., a sequence of nucleotides) related by the base-pairing rules. For example, the sequence “A-G-T”, is complementary to the sequence “T-C-A.” Complementarity may be “partial”, in which only some of the nucleic acids' bases are matched according to the base pairing rules. Or, there may be “complete” or “total” complementarity between the nucleic acids. The degree of complementarity between nucleic acid strands has significant effects on the efficiency and strength of hybridization between nucleic acid strands.

[0050] Throughout this specification, unless the context requires otherwise, the words “comprise”, “comprises” and “comprising” will be understood to imply the inclusion of a stated step or element or group of steps or elements but not the exclusion of any other step or element or group of steps or elements. Thus, use of the term “comprising” and the like indicates that the listed elements are required or mandatory, but that other elements are optional and may or may not be present. By “consisting of” is meant including, and limited to, whatever follows the phrase “consisting of”. Thus, the phrase “consisting of” indicates that the listed elements are required or mandatory, and that no other elements may be present. By “consisting essentially of” is meant including any elements listed after the phrase, and limited to other elements that do not interfere with or contribute to the activity or action specified in the disclosure for the listed elements. Thus, the phrase “consisting essentially of” indicates that the listed elements are required or mandatory, but that other elements are optional and may or may not be present depending upon whether or not they affect the activity or action of the listed elements.

[0051] The term “correlating” refers to determining a relationship between one type of data with another or with a state.

[0052] As used herein, the terms “detectably distinct” and “detectably different” are used interchangeably herein to refer to a signal that is distinguishable or separable by a physical property either by observation or by instrumentation. For example, a fluorophore is readily distinguishable either by spectral characteristics or by fluorescence intensity, lifetime, polarization or photo-bleaching rate from another fluorophore in a sample, as well as from additional materials that are optionally present. In certain embodiments, the terms “detectably distinct” and “detectably different” refer to a set of labels (such as dyes, suitably organic dyes) that can be detected and distinguished simultaneously.

[0053] As used herein, the terms “diagnosis”, “diagnosing” and the like are used interchangeably herein to encompass determining the likelihood that a subject will develop a condition, or the existence or nature of a condition in a subject. These terms also encompass determining the severity of disease or episode of disease, as well as in the context of rational therapy, in which the diagnosis guides therapy, including initial selection of therapy, modification of therapy (e.g., adjustment of dose or dosage regimen), and the like. By “likelihood” is meant a measure of whether a subject with particular measured or derived biomarker values actually has a condition (or not) based on a given mathematical model. An increased likelihood for example may be relative or absolute and may be expressed qualitatively or quantitatively. For instance, an increased likelihood may be determined simply by determining the subject's measured or derived biomarker values for at least two hypoxia biomarkers and placing the subject in an “increased likelihood” category, based upon previous population studies. The term “likelihood” is also used interchangeably herein with the term “probability”. The term “risk” relates to the possibility or probability of a particular event occurring at some point in the future. “Risk stratification” refers to an arraying of known clinical risk factors to allow physicians to classify patients into a low, moderate, high or highest risk of developing a particular disease or condition.

[0054] “Fluorophore” as used herein to refer to a moiety that absorbs light energy at a defined excitation wavelength and emits light energy at a different defined wavelength. Examples of fluorescence labels include, but are not limited to: Alexa Fluor dyes (Alexa Fluor 350, Alexa Fluor 488, Alexa Fluor 532, Alexa Fluor 546, Alexa Fluor 568, Alexa Fluor 594, Alexa Fluor 633, Alexa Fluor 660 and Alexa Fluor 680), AMCA, AMCA-S, BODIPY dyes (BODIPY FL, BODIPY R6G, BODIPY TMR, BODIPY TR, BODIPY 530/550, BODIPY 558/568, BODIPY 564/570, BODIPY 576/589, BODIPY 581/591, BODIPY 630/650, BODIPY 650/665), Carboxyrhodamine 6G, carboxy-X-rhodamine (ROX), Cascade Blue, Cascade Yellow, Cyanine dyes (Cy3, Cy5, Cy3.5, Cy5.5), Dansyl, Dapoxyl, Dialkylaminocoumarin, 4′,5′-Dichloro-2′,7′-dimethoxy-fluorescein, DM-NERF, Eosin, Erythrosin, Fluorescein, FAM, Hydroxycoumarin, IRDyes (IRD40, IRD 700, IRD 800), JOE, Lissamine rhodamine B, Marina Blue, Methoxycoumarin, Naphthofluorescein, Oregon Green 488, Oregon Green 500, Oregon Green 514, Pacific Blue, PyMPO, Pyrene, Rhodamine 6G, Rhodamine Green, Rhodamine Red, Rhodol Green, 2′,4′,5′,7′-Tetra-bromosulfone-fluorescein, Tetramethyl-rhodamine (TMR), Carboxytetramethylrhodamine (TAMRA), Texas Red and Texas Red-X.

[0055] The term “gene”, as used herein, refers to a stretch of nucleic acid that codes for a polypeptide or for an RNA chain that has a function. While it is the exon region of a gene that is transcribed to form mRNA, the term “gene” also includes regulatory regions such as promoters and enhancers that govern expression of the exon region.

[0056] The term “high-density array” refers to a substrate or collection of substrates or surfaces bearing a plurality of array elements (e.g., discrete regions having particular moieties, e.g., proteins (e.g., antibodies), nucleic acids (e.g., oligonucleotide probes), etc., immobilized thereto), where the array elements are present at a density of about 100 elements/cm² or more, about 1,000 elements/cm² or more, about 10,000 elements/cm² or more, or about 100,000 elements/cm² or more. In specific embodiments, a “high-density array” is one that comprises a plurality of array elements for detecting about 100 or more different biomarkers, about 1,000 or more different biomarkers, about 10,000 or more different biomarkers, or about 100,000 or more different biomarkers. In representative example of these embodiments, a “high-density array” is one that comprises a plurality of array elements for detecting biomarkers of about 100 or more different genes, of about 1,000 or more different genes, of about 10,000 or more different genes, or of about 100,000 or more different genes. Generally, the elements of a high-density array are not labeled. The term “low-density array” refers to a substrate or collection of substrates or surfaces bearing a plurality of array elements (e.g., discrete regions having particular moieties, e.g., proteins (e.g., antibodies), nucleic acids (e.g., oligonucleotide probes), etc., immobilized thereto), where the array elements are present at a density of about 100 elements/cm² or less, about 50 elements/cm² or less, about 20 elements/cm² or less, or about 10 elements/cm² or less. In specific embodiments, a “low-density array” is one that comprises a plurality of array elements for detecting about 100 or less different biomarkers, about 50 or less different biomarkers, about 20 or less different biomarkers, or about 10 or less different biomarkers. In representative example of these embodiments, a “low-density array” is one that comprises a plurality of array elements for detecting biomarkers of about 100 or less different genes, of about 50 or less different genes, of about 20 or less different genes, or of about 10 or less different genes. Generally, the elements of a low-density array are not labeled.

[0057] As used herein, the term “hypoxia” refers to an environment in which the oxygen tension of tissue cells is abnormally low compared to that of normal tissue. Such an environment can occur when a tissue is compromised or blood flow. It appears commonly in intractable diseases, including cancer, ischemic stroke, and arthritis. In the case of cancer, as cancer tissue grows, it encounters a hypoxic environment because the inside of solid cancer does not receive oxygen from blood vessels. In conditions of in vitro cell culture, hypoxia may refer to an environment with at most about 5% O₂, preferably to a environment with about 1% O₂. In contrast, the term “normoxia” refers to an environment with an oxygen tension that corresponds to healthy tissue. In conditions of in vitro cell culture, normoxia may refer to a condition with a concentration of O₂ ranging from about 10 to about 21%. In specific embodiments, the O₂ concentration of a normoxic condition is about 15%, 16%, 17%, 18%, 19%, 20%, or 21%. In even more specific embodiments, the O₂ concentration is about 20% to 21%.

[0058] The term “indicator” as used herein refers to a result or representation of a result, including any information, number, ratio, signal, sign, mark, or note by which a skilled artisan can estimate and/or determine a likelihood or risk of whether or not a subject is suffering from a given disease or condition. In the case of the present invention, the “indicator” may optionally be used together with other clinical characteristics, to arrive at a diagnosis (that is, the occurrence or nonoccurrence) of a hypoxic condition or a G9a-associated disease or condition in a subject. That such an indicator is “determined” is not meant to imply that the indicator is 100% accurate. The skilled clinician may use the indicator together with other clinical indicia to arrive at a diagnosis.

[0059] The term “immobilized” means that a molecular species of interest is fixed to a solid support, suitably by covalent linkage. This covalent linkage can be achieved by different means depending on the molecular nature of the molecular species. Moreover, the molecular species may be also fixed on the solid support by electrostatic forces, hydrophobic or hydrophilic interactions or Van-der-Waals forces. The above described physicochemical interactions typically occur in interactions between molecules. In particular embodiments, all that is required is that the molecules (e.g., nucleic acids or polypeptides) remain immobilized or attached to a support under conditions in which it is intended to use the support, for example in applications requiring nucleic acid amplification and/or sequencing or in antibody-binding assays. For example, oligonucleotides or primers are immobilized such that a 3′ end is available for enzymatic extension and/or at least a portion of the sequence is capable of hybridizing to a complementary sequence. In some embodiments, immobilization can occur via hybridization to a surface attached primer, in which case the immobilized primer or oligonucleotide may be in the 3′-5′ orientation. In other embodiments, immobilization can occur by means other than base-pairing hybridization, such as the covalent attachment.

[0060] As used herein, the term “label” and grammatical equivalents thereof, refer to any atom or molecule that can be used to provide a detectable and/or quantifiable signal. In particular, the label can be attached, directly or indirectly, to a nucleic acid or protein. Suitable labels that can be attached include, but are not limited to, radioisotopes, fluorophores, quenchers, chromophores, mass labels, electron dense particles, magnetic particles, spin labels, molecules that emit chemiluminescence, electrochemically active molecules, enzymes, cofactors, and enzyme substrates. A label can include an atom or molecule capable of producing a visually detectable signal when reacted with an enzyme. In some embodiments, the label is a “direct” label which is capable of spontaneously producing a detectible signal without the addition of ancillary reagents and is detected by visual means without the aid of instruments. For example, colloidal gold particles can be used as the label. Many labels are well known to those skilled in the art. In specific embodiments, the label is other than a naturally-occurring nucleoside. The term “label” also refers to an agent that has been artificially added, linked or attached via chemical manipulation to a molecule.

[0061] The “level” or “amount” of a biomarker is a detectable level or amount in a sample. These can be measured by methods known to one skilled in the art and also disclosed herein. These terms encompass a quantitative amount or level (e.g., weight or moles), a semi-quantitative amount or level, a relative amount or level (e.g., weight % or mole % within class), a concentration, and the like. Thus, these terms encompass absolute or relative amounts or levels or concentrations of a biomarker in a sample. The expression level or amount of biomarker assessed can be used to determine the response to treatment. In specific embodiments in which the level of a biomarker is “reduced” relative to a reference or control, the reduced level may refer to an overall reduction of any of at least about 10%, 20%, 30%, 40%, 50%, 60%, 70%, 80%, 90%, 95%, 96%, 97%, 98%, 99% or greater, in the level of biomarker (e.g., protein or nucleic acid (e.g., gene or mRNA)), detected by standard art known methods such as those described herein, as compared to a reference sample, reference cell, reference tissue, control sample, control cell, or control tissue. In certain embodiments, reduced level refers to a decrease in level/amount of a biomarker in the sample wherein the decrease is at least about any of 0.9×, 0.8×, 0.7×, 0.6×, 0.5×, 0.4×, 0.3×, 0.2×, 0.1×, 0.05×, or 0.01× the level/amount of the respective biomarker in a reference sample, reference cell, reference tissue, control sample, control cell, or control tissue. In certain embodiments in which the level of a biomarker is “about the same” a reference or control, the level of biomarker varies by less than about 10%, 9%, 8%, 7%, 6%, 5%, 4%, 3%, 2%, 1%, 0.5%, 0.1%, or even less, as compared to the level of biomarker (e.g., protein or nucleic acid (e.g., gene or mRNA)), detected by standard art known methods such as those described herein, in a reference sample, reference cell, reference tissue, control sample, control cell, or control tissue.

[0062] The term “microarray” refers to an arrangement of hybridizable array elements, e.g., probes (including primers), ligands, biomarker nucleic acid sequence or protein sequences on a substrate.

[0063] The term “nucleic acid” or “polynucleotide” as used herein includes RNA, mRNA, miRNA, cRNA, cDNA mtDNA, or DNA. The term typically refers to a polymeric form of nucleotides of at least 10 bases in length, either ribonucleotides or deoxynucleotides or a modified form of either type of nucleotide. The term includes single and double stranded forms of DNA or RNA.

[0064] By “obtained” is meant to come into possession. Samples so obtained include, for example, nucleic acid extracts or polypeptide extracts isolated or derived from a particular source. For instance, the extract may be isolated directly from a biological fluid or tissue of a subject.

[0065] As used herein, the term “positive response” means that the result of a treatment regimen includes some clinically significant benefit, such as the prevention, or reduction of severity, of symptoms, or a slowing of the progression of the condition. By contrast, the term “negative response” means that a treatment regimen provides no clinically significant benefit, such as the prevention, or reduction of severity, of symptoms, or increases the rate of progression of the condition.

[0066] “Protein”, “polypeptide” and “peptide” are used interchangeably herein to refer to a polymer of amino acid residues and to variants and synthetic analogues of the same.

[0067] By “primer” is meant an oligonucleotide which, when paired with a strand of DNA, is capable of initiating the synthesis of a primer extension product in the presence of a suitable polymerizing agent. The primer is preferably single-stranded for maximum efficiency in amplification but can alternatively be double-stranded. A primer must be sufficiently long to prime the synthesis of extension products in the presence of the polymerization agent. The length of the primer depends on many factors, including application, temperature to be employed, template reaction conditions, other reagents, and source of primers. For example, depending on the complexity of the target sequence, the primer may be at least about 5, 6, 7, 8, 9, 10, 11, 12, 13, 14, 15, 16, 17, 18, 19, 20, 21, 22, 23, 24, 25, 26, 27, 28, 29, 30, 35, 40, 50, 75, 100, 150, 200, 300, 400, 500, to one base shorter in length than the template sequence at the 3′ end of the primer to allow extension of a nucleic acid chain, though the 5′ end of the primer may extend in length beyond the 3′ end of the template sequence. In certain embodiments, primers can be large polynucleotides, such as from about 35 nucleotides to several kilobases or more. Primers can be selected to be “substantially complementary” to the sequence on the template to which it is designed to hybridize and serve as a site for the initiation of synthesis. By “substantially complementary”, it is meant that the primer is sufficiently complementary to hybridize with a target polynucleotide. Desirably, the primer contains no mismatches with the template to which it is designed to hybridize but this is not essential. For example, non-complementary nucleotide residues can be attached to the 5′ end of the primer, with the remainder of the primer sequence being complementary to the template. Alternatively, non-complementary nucleotide residues or a stretch of non-complementary nucleotide residues can be interspersed into a primer, provided that the primer sequence has sufficient complementarity with the sequence of the template to hybridize therewith and thereby form a template for synthesis of the extension product of the primer.

[0068] As used herein, the term “probe” refers to a molecule that binds to a specific sequence or sub-sequence or other moiety of another molecule. Unless otherwise indicated, the term “probe” typically refers to a nucleic acid probe that binds to another nucleic acid, also referred to herein as a “target polynucleotide”, through complementary base pairing. Probes can bind target polynucleotides lacking complete sequence complementarity with the probe, depending on the stringency of the hybridization conditions. Probes can be labeled directly or indirectly and include primers within their scope.

[0069] The term “prognosis” as used herein refers to a prediction of the probable course and outcome of a clinical condition or disease. A prognosis is usually made by evaluating factors or symptoms of a disease that are indicative of a favorable or unfavorable course or outcome of the disease. The skilled artisan will understand that the term “prognosis” refers to an increased probability that a certain course or outcome will occur; that is, that a course or outcome is more likely to occur in a subject exhibiting a given condition, when compared to those individuals not exhibiting the condition.

[0070] As used herein, the term “quencher” includes any moiety that in close proximity to a donor fluorophore, takes up emission energy generated by the donor fluorophore and either dissipates the energy as heat or emits light of a longer wavelength than the emission wavelength of the donor fluorophore. In the latter case, the quencher is considered to be an acceptor fluorophore. The quenching moiety can act via proximal (i.e., collisional) quenching or by Forster or fluorescence resonance energy transfer (“FRET”). Quenching by FRET is generally used in TAQMAN® probes while proximal quenching is used in molecular beacon and SCORPION® type probes. Suitable quenchers are selected based on the fluorescence spectrum of the particular fluorophore. Useful quenchers include, for example, the BLACK HOLE™ quenchers BHQ-1, BHQ-2, and BHQ-3 (Biosearch Technologies, Inc.), and the ATTO-series of quenchers (ATTO 540Q, ATTO 580Q, and ATTO 612Q; Atto-Tec GmbH).

[0071] The term “sample” as used herein includes any biological specimen that may be extracted, untreated, treated, diluted or concentrated from a subject. Samples may include, without limitation, biological fluids such as whole blood, serum, red blood cells, white blood cells, plasma, saliva, urine, stool (i.e., faeces), tears, sweat, sebum, nipple aspirate, ductal lavage, tumor exudates, synovial fluid, ascitic fluid, peritoneal fluid, amniotic fluid, cerebrospinal fluid, lymph, fine needle aspirate, amniotic fluid, any other bodily fluid, cell lysates, cellular secretion products, inflammation fluid, semen and vaginal secretions. Samples may include tissue samples and biopsies, tissue homogenates and the like. Advantageous samples may include ones comprising any one or more biomarkers as taught herein in detectable quantities. Suitably, the sample is readily obtainable by minimally invasive methods, allowing the removal or isolation of the sample from the subject. Typically, the sample comprises blood cells such as mature, immature or developing leukocytes, including lymphocytes, polymorphonuclear leukocytes, neutrophils, monocytes, reticulocytes, basophils, coelomocytes, hemocytes, eosinophils, megakaryocytes, macrophages, dendritic cells natural killer cells, or fraction of such cells (e.g., a nucleic acid or protein fraction). In specific embodiments, the sample comprises cancer or tumor cells.

[0072] The term “solid support” as used herein refers to a solid inert surface or body to which a molecular species, such as a nucleic acid and polypeptides can be immobilized. Non-limiting examples of solid supports include glass surfaces, plastic surfaces, latex, dextran, polystyrene surfaces, polypropylene surfaces, polyacrylamide gels, gold surfaces, and silicon wafers. In some embodiments, the solid supports are in the form of membranes, chips or particles. For example, the solid support may be a glass surface (e.g., a planar surface of a flow cell channel). In some embodiments, the solid support may comprise an inert substrate or matrix which has been “functionalized”, such as by applying a layer or coating of an intermediate material comprising reactive groups which permit covalent attachment to molecules such as polynucleotides. By way of non-limiting example, such supports can include polyacrylamide hydrogels supported on an inert substrate such as glass. The molecules (e.g., polynucleotides) can be directly covalently attached to the intermediate material (e.g., a hydrogel) but the intermediate material can itself be non-covalently attached to the substrate or matrix (e.g., a glass substrate). The support can include a plurality of particles or beads each having a different attached molecular species.

[0073] The terms “subject”, “individual” and “patient” are used interchangeably herein to refer to an animal subject, particularly a vertebrate subject, and even more particularly a mammalian subject. Suitable vertebrate animals that fall within the scope of the invention include, but are not restricted to, any member of the phylum Chordata, subphylum vertebrata including primates, rodents (e.g., mice rats, guinea pigs), lagomorphs (e.g., rabbits, hares), bovines (e.g., cattle), ovines (e.g., sheep), caprines (e.g., goats), porcines (e.g., pigs), equines (e.g., horses), canines (e.g., dogs), felines (e.g., cats), avians (e.g., chickens, turkeys, ducks, geese, companion birds such as canaries, budgerigars etc.), marine mammals (e.g., dolphins, whales), reptiles (snakes, frogs, lizards, etc.), and fish. A preferred subject is a primate (e.g., a human, ape, monkey, chimpanzee). The subject suitably has at least one (e.g., 1, 2, 3, 4, 5 or more) clinical sign of a hypoxic condition.

[0074] As used herein, the term “treatment regimen” refers to prophylactic and/or therapeutic (i.e., after onset of a specified condition) treatments, unless the context specifically indicates otherwise. The term “treatment regimen” encompasses natural substances and pharmaceutical agents (i.e., “drugs”) as well as any other treatment regimen including but not limited to dietary treatments, physical therapy or exercise regimens, surgical interventions, and combinations thereof.

[0075] It will be appreciated that the terms used herein and associated definitions are used for the purpose of explanation only and are not intended to be limiting.

### 2. Hypoxia Biomarkers

[0076] The present invention concerns methods, apparatus, compositions and kits for identifying the presence or absence of a hypoxic condition (e.g., a hypoxic cancer) in a subject, or for providing a prognosis for subjects with a disease or condition that is associated with a hypoxic condition. In particular, hypoxia biomarkers are disclosed for use in these modalities to assess the likelihood of the presence or absence of a hypoxic condition (e.g., a hypoxic cancer) in a subject, or for providing a prognosis for subjects with a disease or condition that is associated with a hypoxic condition. The methods, apparatus, compositions and kits of the invention are useful for early detection of a hypoxic condition (e.g., a hypoxic cancer) in a subject, thus allowing better treatment interventions for subjects with a disease or condition that is associated with the hypoxic condition.

[0077] The present inventors have determined that certain expression products are commonly, specifically and differentially expressed in a hypoxic condition in a subject when compared with a normoxic condition. The results presented herein provide clear evidence that a unique biologically-relevant biomarker profile predicts hypoxia with a remarkable degree of accuracy. This hypoxia biomarker profile was validated in an in vivo model (see, Example 5 for details). Overall, these findings provide compelling evidence that the expression products disclosed herein can function as biomarkers for hypoxia and may potentially serve as a useful diagnostic for triaging treatment decisions for subjects with a hypoxic condition, or a disease or condition that is associated with hypoxia. In this regard, it is proposed that the methods, apparatus, compositions and kits disclosed herein that are based on these biomarkers may serve in the point-of-care diagnostics that allow for rapid and inexpensive screening for hypoxia, which may result in significant cost savings to the medical system as subjects can be exposed to appropriate therapeutic agents that are suitable for treating a disease or condition that is associated with a hypoxic condition (e.g., a G9a antagonist) as opposed to therapeutic agents for diseases or conditions that are not associated with a hypoxic condition.

[0078] Thus, specific expression products are disclosed herein as hypoxia biomarkers that provide a means for identifying the presence or absence of a hypoxic condition in a subject. Evaluation of these hypoxia biomarkers through analysis of their levels in a subject or in a sample taken from a subject provides a measured or derived biomarker value for determining an indicator that can be used for assessing the presence or absence of a hypoxic condition in a subject or for providing a prognosis for a disease or condition that is associated with hypoxia in a subject.

[0079] Accordingly, biomarker values can be measured derived biomarker values, which are values that have been derived from one or more measured biomarker values, for example by applying a function to the one or more measured biomarker values. As used herein, biomarkers to which a function has been applied are referred to as “derived markers”.

[0080] The biomarker values may be determined in any one of a number of ways. An exemplary method of determining biomarker values is described by the present inventors in WO 2015/117204, which is incorporated herein by reference in its entirety. In one example, the process of determining biomarker values can include measuring the biomarker values, for example by performing tests on the subject or on sample(s) taken from the subject. More typically however, the step of determining the biomarker values includes having an electronic processing device receive or otherwise obtain biomarker values that have been previously measured or derived. This could include for example, retrieving the biomarker values from a data store such as a remote database, obtaining biomarker values that have been manually input, using an input device, or the like. The indicator is determined using a combination of the plurality of biomarker values, the indicator being at least partially indicative of the presence, or absence of a hypoxic condition. Assuming the method is performed using an electronic processing device, an indication of the indicator is optionally displayed or otherwise provided to the user. In this regard, the indication could be a graphical or alphanumeric representation of an indicator value. Alternatively, however, the indication could be the result of a comparison of the indicator value to predefined thresholds or ranges, or alternatively could be an indication of the presence or absence of a hypoxic condition, or prognosis for a disease or condition that is associated with hypoxia, derived using the indicator.

[0081] In some embodiments, biomarker values are combined, for example by adding, multiplying, subtracting, or dividing biomarker values to determine an indicator value. This step is performed so that multiple biomarker values can be combined into a single indicator value, providing a more useful and straightforward mechanism for allowing the indicator to be interpreted and hence used in diagnosing the presence or absence of a hypoxic condition in the subject, or providing a prognosis for a disease or condition that is associated with hypoxia in the subject.

[0082] In some embodiments in which a plurality of biomarkers and biomarker values are used, in order to ensure that an effective diagnosis or prognosis can be determined, at least two of the biomarkers have a mutual correlation in respect of hypoxia that lies within a mutual correlation range, the mutual correlation range being between ±0.9. This requirement means that the two biomarkers are not entirely correlated in respect of each other when considered in the context of the hypoxic condition (e.g., hypoxic cancer) being diagnosed. In other words, at least two of the biomarkers in the combination respond differently as the condition changes, which adds significantly to their ability when combined to discriminate between at least two conditions, to diagnose the presence or absence of a hypoxic condition, and/or to provide a prognosis for the disease or condition that is associated with hypoxia in the subject.

[0083] Typically, the requirement that biomarkers have a low mutual correlation means that the biomarkers may relate to different biological attributes or domains such as, but not limited, to different molecular functions, different biological processes and different cellular components. Illustrative examples of molecular function include addition of, or removal of, one of more of the following moieties to, or from, a protein, polypeptide, peptide, nucleic acid (e.g., DNA, RNA): linear, branched, saturated or unsaturated alkyl (e.g., C1-C24 alkyl); phosphate; ubiquitin; acyl; fatty acid, lipid, phospholipid; nucleotide base; hydroxyl and the like. Molecular functions also include signaling pathways, including without limitation, receptor signaling pathways and nuclear signaling pathways. Non-limiting examples of molecular functions also include cleavage of a nucleic acid, peptide, polypeptide or protein at one or more sites; polymerization of a nucleic acid, peptide, polypeptide or protein; translocation through a cell membrane (e.g., outer cell membrane; nuclear membrane); translocation into or out of a cell organelle (e.g., Golgi apparatus, lysosome, endoplasmic reticulum, nucleus, mitochondria); receptor binding, receptor signaling, membrane channel binding, membrane channel influx or efflux; and the like.

[0084] Illustrative examples of biological processes include: stages of the cell cycle such as meiosis, mitosis, cell division, prophase, metaphase, anaphase, telophase and interphase, stages of cell differentiation; apoptosis; necrosis; chemotaxis; immune responses including adaptive and innate immune responses, pro-inflammatory immune responses, autoimmune responses, tolerogenic responses and the like. Other illustrative examples of biological processes include generating or breaking down adenosine triphosphate (ATP), saccharides, polysaccharides, fatty acids, lipids, phospholipids, sphingolipids, glycolipids, cholesterol, nucleotides, nucleic acids, membranes (e.g., cell plasma membrane, nuclear membrane), amino acids, peptides, polypeptides, proteins and the like. Representative examples of cellular components include organelles, membranes, as for example noted above, and others.

[0085] It will be understood that the use of biomarkers that have different biological attributes or domains provides further information than if the biomarkers were related to the same or common biological attributes or domains. In this regard, it will be appreciated if the at least two biomarkers are highly correlated to each other, the use of both biomarkers would add little diagnostic/prognostic improvement compared to the use of a single one of the biomarkers. Accordingly, an indicator-determining method of the present invention in which a plurality of biomarkers and biomarker values are used preferably employ biomarkers that are not well correlated with each other, thereby ensuring that the inclusion of each biomarker in the method adds significantly to the discriminative ability of the indicator.

[0086] Despite this, in order to ensure that the indicator can accurately be used in performing the discrimination between the presence or absence of a hypoxic condition (e.g., a hypoxic cancer) or the provision of a prognosis for a disease or condition that is associate with hypoxia, the indicator has a performance value that is greater than or equal to a performance threshold. The performance threshold may be of any suitable form but is to be typically indicative of an explained variance of at least 0.3, or an equivalent value of another performance measure.

[0087] Suitably, a combination of biomarkers is employed, which biomarkers have a mutual correlation between ±0.9 and which combination provides an explained variance of at least 0.3. This typically allows an indicator to be defined that is suitable for ensuring that an accurate diagnosis or prognosis can be obtained whilst minimizing the number of biomarkers that are required. Typically, the mutual correlation range is one of ±0.8; ±0.7; ±0.6; ±0.5; ±0.4; ±0.3; ±0.2; and, ±0.1. Typically, each hypoxia biomarker has a condition correlation with the presence or absence of a hypoxic condition (e.g., hypoxic cancer) or with a prognosis for a disease or condition that is associated with hypoxia, that lies outside a condition correlation range, the condition correlation range being between ±0.3 and more typically ±0.9; ±0.8; ±0.7; ±0.6; ±0.5; and, ±0.4. Typically, the performance threshold is indicative of an explained variance of at least one of 0.4; 0.5; 0.6; 0.7; 0.8; and 0.9.

[0088] It will be understood that in this context, the biomarkers used within the above-described method can define a biomarker profile for a hypoxic condition which includes a minimal number of biomarkers, whilst maintaining sufficient performance to allow the biomarker profile to be used in making a clinically relevant diagnosis, prognosis, or differentiation. Minimizing the number of biomarkers used minimizes the costs associated with performing diagnostic or prognostic tests and in the case of nucleic acid expression products, allows the test to be performed utilizing relatively straightforward techniques such as nucleic acid array, and polymerase chain reaction (PCR) processes, or the like, allowing the test to be performed rapidly in a clinical environment.

[0089] Furthermore, producing a single indicator value allows the results of the test to be easily interpreted by a clinician or other medical practitioner, so that test can be used for reliable diagnosis in a clinical environment.

[0090] Processes for generating suitable biomarker profiles are described for example in WO 2015/117204, which uses the term “biomarker signature” in place of “biomarker profile” as defined herein. It will be understood, therefore, that terms “biomarker profile” and “biomarker signature” are equivalent in scope. The biomarker profile-generating processes disclosed in WO 2015/117204 provide mechanisms for selecting a combination of biomarkers, and more typically derived biomarkers, that can be used to form a biomarker profile, which in turn can be used in diagnosing the presence or absence of a hypoxic condition (e.g., a hypoxic cancer) or in providing a prognosis for a disease or condition that is associated with hypoxia. In this regard, the biomarker profile defines the biomarkers that should be measured (i.e., the profile biomarkers), how derived biomarker values should be determined for measured biomarker values, and then how biomarker values should be subsequently combined to generate an indicator value. The biomarker profile can also specify defined indicator value ranges that indicate a particular presence or absence of a hypoxic condition (e.g., hypoxic cancer) or that provide a prognosis for a disease or condition that is associated with hypoxia.

[0091] Using the above-described methods a number of biomarkers have been identified that are particularly useful for assessing a likelihood of the presence or absence of a hypoxic condition in a subject or for providing a prognosis for a disease or condition that is associated with hypoxia. These biomarkers are referred to herein as “hypoxia biomarkers”. As used herein, the term “hypoxia biomarker” refers to a biomarker of the host which is altered, or whose level of expression is altered, as part of a response to damage or insult resulting from a decreased concentration of oxygen (02), relative to normal tissue. The hypoxia biomarkers are suitably expression products of genes (also referred to interchangeably herein as “hypoxia biomarker genes”), including polynucleotide and polypeptide expression products. As used herein, polynucleotide expression products of hypoxia biomarker genes are referred to herein as “hypoxia biomarker polynucleotides”. Polypeptide expression products of the hypoxia biomarker genes are referred to herein as “hypoxia biomarker polypeptides.”

[0092] Hypoxia biomarkers are suitably selected from expression products of any one or more of the following hypoxia genes: AGBL3, AGMO, AGTR1, ALS2CR12, ALX1, ANAPC5, ANKRD20A1, ANXA13, AP1AR, ARHGAP10, ARMCX1, ARNTL, C10orf25, C14orf169, C18orf34, C18orf62, C1QTNF9, C2orf76, C6orf 165, C7orf45, C7orf62, C9orf131, C9orf85, CA10, CAPNS2, CCDC121, CCDC141, CD1C, CDH11, CEACAM7, CEP170P1, CYTIP, DBF4, DDX56, DPPA2, DPPA3P2, DTX2, EIF4G2, ELMO1, ELOVL3, ENAM, FAM172BP, FCGR1A, FFAR2, FGF12, FGFR2, FLJ42102, FLJ44838, FLJ45721, FN1, FOXP2, GATA2, GDI2, GGTLC2, GK2, GPR78, HARBI1, HEMGN, HHEX, HIST1H2AA, HMGN2, HMGN2P28, HMGN2P46, HOXC13, HPDL, HRCT1, HRH1, HS3ST3B1, HSD3B2, ICA1L, IDO2, IL10, IL17A, IL18, IL1B, KARS, KBTBD6, KCNA2, KLB, KLRG1, KMO, KRT10, KRT222, LCN1, LIG4, LINC00312, LINC00328, LINC00596, LLPH, LOC100049716, LOC100287879, LOC221442, LOC642947, LOC644714, LRRC37A5P, LRRC53, LTA, MEIG1, METTL2A, MGAT2, MGC23270, MILR1, MIR148A, MIR218-1, MIR34B, MIR494, MIR516B2, MMP16, MMP27, MPP1, MRPL30, MUTYH, MYH8, NBLA00301, NCRNA00185, ND6, NEFM, NEUROD1, NONO, NPCDR1, NPY5R, OCM, OCM2, OGN, OR10A2, OR2A12, OR2D3, OR2M3, OR2T2, OR2T35, OR4D10, OR4D2, OR5J2, OR5M10, OR8H3, OR9G1, ORM2, OTOG, PAGE2B, PLAG1, PRL, PRPF8, PSCA, PTPN20A, RBM44, RBMY1C, RBMY1F, RFK, RIMBP3, RN18S1, RN5S1, RN7SK, RN7SL1, RNF152, RNF185, RNPS1, RNU11, RNU1-4, RNU2-1, RNU4-2, RNU5F-1, RNU6-2, RNY1, RP11-165H20.1, RPL21P68, RPS27AP17, S1PR3, SART1, SDAD1, SEPP1, SETD9, SIGLEC14, SKAP1, SLC36A3, SLC8A1, SLC9B1P2, SLCO4C1, SMNDC1, SNORA1, SNORA72, SNORA75, SNORD114-2, SNORD115-10, SNORD116-19, SNORD18A, SNORD3B-1, SPOCK3, ST6GAL1, STAMBPL1, TAF1D, TAS2R14, TBCCD1, TCEB3B, TMEM100, TMIGD1, TOB2, TUBB8, UBD, UGT2B17, UQCRFS1, VNN1, ZC3HC1, ZCCHC12, ZNF222, ZNF259, ZNF439, ZNF487P, ZNF569, ZNF678, ZNF684, ZNF716, ZNF718, ZNRF3, ZSCAN29, and CDH10. Non-limiting examples of nucleotide sequences for these hypoxia biomarkers are listed in SEQ ID NOs: 1-201. Non-limiting examples of corresponding amino acid sequences for these hypoxia biomarkers are listed in SEQ ID NOs: 202-367.

[0093] In more specific embodiments, the one or more hypoxia genes are selected from ARNTL, CD1C, HHEX, KLRG1, MMP16, FGFR2, GATA2, CEACAM7, OGN, and AGTR1. More specifically, 1, 2, 3, 4, or 5 hypoxia biomarkers may be selected from ARNTL, CEACAM7, GATA2, HHEX, KLRG1, and OGN.

[0094] In some of the same embodiments and other embodiments, two or more hypoxia biomarkers may be selected from Table 1.

TABLE 1

| Biomarker 1 | Biomarker 2 |
|---|---|
| ARNTL | CD1C, HHEX, KLRG1, MMP16, |
| | FGFR2, GATA2, CEACAM7, OGN, |
| | AGTR1 |
| CD1C | HHEX, KLRG1, MMP16, FGFR2, |
| | GATA2, CEACAM7, OGN, AGTR1 |
| HHEX | KLRG1, MMP16, FGFR2, GATA2, |
| | CEACAM7, OGN, AGTR1 |
| KLRG1 | MMP16, FGFR2, GATA2, CEACAM7, |
| | OGN, AGTR1 |
| MMP16 | FGFR2, GATA2, CEACAM7, OGN, |
| | AGTR1 |
| FGFR2 | GATA2, CEACAM7, OGN, AGTR1 |
| GATA2 | CEACAM7, OGN, AGTR1 |
| KLRG1 | OGN, AGTR1 |
| OGN | AGTR1 |

[0095] In some of the same embodiments and other embodiments, two or more hypoxia biomarkers may be selected from Table 2.

TABLE 2

| Biomarker 1 | Biomarker 2 | Biomarker 3 |
|---|---|---|
| ARNTL | CD1C | HHEX, KLRG1, MMP16, FGFR2, |
| | | GATA2, CEACAM7, OGN, AGTR1 |
| | HHEX | KLRG1, MMP16, FGFR2, GATA2, |
| | | CEACAM7, OGN, AGTR1 |
| | KLRG1 | MMP16, FGFR2, GATA2, |
| | | CEACAM7, OGN, AGTR1 |
| | MMP16 | FGFR2, GATA2, CEACAM7, OGN, |
| | | AGTR1 |
| | FGFR2 | GATA2, CEACAM7, OGN, AGTR1 |
| | GATA2 | CEACAM7, OGN, AGTR1 |
| | CEACAM7 | OGN, AGTR1 |
| | OGN | AGTR1 |
| CD1C | HHEX | KLRG1, MMP16, FGFR2, GATA2, |
| | | CEACAM7, OGN, AGTR1 |
| | KLRG1 | MMP16, FGFR2, GATA2, |
| | | CEACAM7, OGN, AGTR1 |
| | MMP16 | FGFR2, GATA2, CEACAM7, OGN, |
| | | AGTR1 |
| | FGFR2 | GATA2, CEACAM7, OGN, AGTR1 |
| | GATA2 | CEACAM7, OGN, AGTR1 |
| | CEACAM7 | OGN, AGTR1 |
| | OGN | AGTR1 |
| HHEX | KLRG1 | MMP16, FGFR2, GATA2, |
| | | CEACAM7, OGN, AGTR1 |
| | MMP16 | FGFR2, GATA2, CEACAM7, OGN, |
| | | AGTR1 |
| | FGFR2 | GATA2, CEACAM7, OGN, AGTR1 |
| | GATA2 | CEACAM7, OGN, AGTR1 |
| | CEACAM7 | OGN, AGTR1 |
| | OGN | AGTR1 |
| KLRG1 | MMP16 | FGFR2, GATA2, CEACAM7, OGN, |
| | | AGTR1 |
| | FGFR2 | GATA2, CEACAM7, OGN, AGTR1 |
| | GATA2 | CEACAM7, OGN, AGTR1 |
| | CEACAM7 | OGN, AGTR1 |
| | OGN | AGTR1 |
| MMP16 | FGFR2 | GATA2, CEACAM7, OGN, AGTR1 |
| | GATA2 | CEACAM7, OGN, AGTR1 |
| | CEACAM7 | OGN, AGTR1 |
| | OGN | AGTR1 |
| FGFR2 | GATA2 | CEACAM7, OGN, AGTR1 |
| | CEACAM7 | OGN, AGTR1 |
| | OGN | AGTR1 |
| GATA2 | CEACAM7 | OGN, AGTR1 |
| | OGN | AGTR1 |
| KLRG1 | OGN | AGTR1 |

[0096] In some of the same embodiments and other embodiments, four or more hypoxia biomarkers may be selected from Table 3.

TABLE 3

| Biomarker 1 | Biomarker 2 | Biomarker 3 | Biomarker 4 |
|---|---|---|---|
| ARNTL | CD1C | HHEX | KLRG1, MMP16, FGFR2, |
| | | | GATA2, CEACAM7, OGN, |
| | | | AGTR1 |
| | | KLRG1 | MMP16, FGFR2, GATA2, |
| | | | CEACAM7, OGN, AGTR1 |
| | | MMP16 | FGFR2, GATA2, |
| | | | CEACAM7, OGN, AGTR1 |
| | | FGFR2 | GATA2, CEACAM7, OGN, |
| | | | AGTR1 |
| | | GATA2 | CEACAM7, OGN, AGTR1 |
| | | CEACAM7 | OGN, AGTR1 |
| | | OGN | AGTR1 |
| | HHEX | KLRG1 | MMP16, FGFR2, GATA2, |
| | | | CEACAM7, OGN, AGTR1 |
| | | MMP16 | FGFR2, GATA2, |
| | | | CEACAM7, OGN, AGTR1 |
| | | FGFR2 | GATA2, CEACAM7, OGN, |
| | | | AGTR1 |
| | | GATA2 | CEACAM7, OGN, AGTR1 |
| | | CEACAM7 | OGN, AGTR1 |
| | | OGN | AGTR1 |
| | KLRG1 | MMP16 | FGFR2, GATA2, |
| | | | CEACAM7, OGN, AGTR1 |
| | | FGFR2 | GATA2, CEACAM7, OGN, |
| | | | AGTR1 |
| | | GATA2 | CEACAM7, OGN, AGTR1 |
| | | CEACAM7 | OGN, AGTR1 |
| | | OGN | AGTR1 |
| | MMP16 | FGFR2 | GATA2, CEACAM7, OGN, |
| | | | AGTR1 |
| | | GATA2 | CEACAM7, OGN, AGTR1 |
| | | CEACAM7 | OGN, AGTR1 |
| | | OGN | AGTR1 |
| | FGFR2 | GATA2 | CEACAM7, OGN, AGTR1 |
| | | CEACAM7 | OGN, AGTR1 |
| | | OGN | AGTR1 |
| | GATA2 | CEACAM7 | OGN, AGTR1 |
| | | OGN | AGTR1 |
| | CEACAM7 | OGN | AGTR1 |
| CD1C | HHEX | KLRG1 | MMP16, FGFR2, GATA2, |
| | | | CEACAM7, OGN, AGTR1 |
| | | MMP16 | FGFR2, GATA2, |
| | | | CEACAM7, OGN, AGTR1 |
| | | FGFR2 | GATA2, CEACAM7, OGN, |
| | | | AGTR1 |
| | | GATA2 | CEACAM7, OGN, AGTR1 |
| | | CEACAM7 | OGN, AGTR1 |
| | | OGN | AGTR1 |
| | KLRG1 | MMP16 | FGFR2, GATA2, |
| | | | CEACAM7, OGN, AGTR1 |
| | | FGFR2 | GATA2, CEACAM7, OGN, |
| | | | AGTR1 |
| | | GATA2 | CEACAM7, OGN, AGTR1 |
| | | CEACAM7 | OGN, AGTR1 |
| | | OGN | AGTR1 |
| | MMP16 | FGFR2 | GATA2, CEACAM7, OGN, |
| | | | AGTR1 |
| | | GATA2 | CEACAM7, OGN, AGTR1 |
| | | CEACAM7 | OGN, AGTR1 |
| | | OGN | AGTR1 |
| | FGFR2 | GATA2 | CEACAM7, OGN, AGTR1 |
| | | CEACAM7 | OGN, AGTR1 |
| | | OGN | AGTR1 |
| | GATA2 | CEACAM7 | OGN, AGTR1 |
| | | OGN | AGTR1 |
| | CEACAM7 | OGN | AGTR1 |
| HHEX | KLRG1 | MMP16 | FGFR2, GATA2, |
| | | | CEACAM7, OGN, AGTR1 |
| | | FGFR2 | GATA2, CEACAM7, OGN, |
| | | | AGTR1 |
| | | GATA2 | CEACAM7, OGN, AGTR1 |
| | | CEACAM7 | OGN, AGTR1 |
| | | OGN | AGTR1 |
| | MMP16 | FGFR2 | GATA2, CEACAM7, OGN, |
| | | | AGTR1 |
| | | GATA2 | CEACAM7, OGN, AGTR1 |
| | | CEACAM7 | OGN, AGTR1 |
| | | OGN | AGTR1 |
| | FGFR2 | GATA2 | CEACAM7, OGN, AGTR1 |
| | | CEACAM7 | OGN, AGTR1 |
| | | OGN | AGTR1 |
| | GATA2 | CEACAM7 | OGN, AGTR1 |
| | | OGN | AGTR1 |
| | CEACAM7 | OGN | AGTR1 |
| KLRG1 | MMP16 | FGFR2 | GATA2, CEACAM7, |
| | | | OGN, AGTR1 |
| | | GATA2 | CEACAM7, OGN, AGTR1 |
| | | CEACAM7 | OGN, AGTR1 |
| | | OGN | AGTR1 |
| | FGFR2 | GATA2 | CEACAM7, OGN, AGTR1 |
| | | CEACAM7 | OGN, AGTR1 |
| | | OGN | AGTR1 |
| | GATA2 | CEACAM7 | OGN, AGTR1 |
| | | OGN | AGTR1 |
| | CEACAM7 | OGN | AGTR1 |
| MMP16 | FGFR2 | GATA2 | CEACAM7, OGN, AGTR1 |
| | | CEACAM7 | OGN, AGTR1 |
| | | OGN | AGTR1 |
| | GATA2 | CEACAM7 | OGN, AGTR1 |
| | | OGN | AGTR1 |
| | CEACAM7 | OGN | AGTR1 |
| FGFR2 | GATA2 | CEACAM7 | OGN, AGTR1 |
| | | OGN | AGTR1 |
| | CEACAM7 | OGN | AGTR1 |
| GATA2 | CEACAM7 | OGN | AGTR1 |

[0097] In some of the same embodiments and other embodiments, five or more hypoxia biomarkers may be selected from Table 4.

TABLE 4

| Bio- | Bio- | Bio- | Bio- | Bio- |
|---|---|---|---|---|
| marker 1 | marker 2 | marker 3 | marker 4 | marker 5 |
| ARNTL | CD1C | HHEX | KLRG1 | MMP16, FGFR2, |
| | | | | GATA2, |
| | | | | CEACAM7, |
| | | | | OGN, AGTR1 |
| | | | MMP16 | FGFR2, GATA2, |
| | | | | CEACAM7, OGN, |
| | | | | AGTR1 |
| | | | FGFR2 | GATA2, |
| | | | | CEACAM7, |
| | | | | OGN, AGTR1 |
| | | | GATA2 | CEACAM7, OGN, |
| | | | | AGTR1 |
| | | | CEACAM7 | OGN, AGTR1 |
| | | | OGN | AGTR1 |
| | | KLRG1 | MMP16 | FGFR2, GATA2, |
| | | | | CEACAM7, OGN, |
| | | | | AGTR1 |
| | | | FGFR2 | GATA2, |
| | | | | CEACAM7, |
| | | | | OGN, AGTR1 |
| | | | GATA2 | CEACAM7, OGN, |
| | | | | AGTR1 |
| | | | CEACAM7 | OGN, AGTR1 |
| | | | OGN | AGTR1 |
| | | MMP16 | FGFR2 | GATA2, |
| | | | | CEACAM7, |
| | | | | OGN, AGTR1 |
| | | | GATA2 | CEACAM7, OGN, |
| | | | | AGTR1 |
| | | | CEACAM7 | OGN, AGTR1 |
| | | | OGN | AGTR1 |
| | | FGFR2 | GATA2, | CEACAM7, OGN, |
| | | | | AGTR1 |
| | | | CEACAM7 | OGN, AGTR1 |
| | | | OGN | AGTR1 |
| | | GATA2 | CEACAM7 | OGN, AGTR1 |
| | | | OGN | AGTR1 |
| | | CEACAM7 | OGN | AGTR1 |
| | HHEX | KLRG1 | MMP16 | FGFR2, GATA2, |
| | | | | CEACAM7, OGN, |
| | | | | AGTR1 |
| | | | FGFR2 | GATA2, |
| | | | | CEACAM7, |
| | | | | OGN, AGTR1 |
| | | | GATA2 | CEACAM7, OGN, |
| | | | | AGTR1 |
| | | | CEACAM7 | OGN, AGTR1 |
| | | | OGN | AGTR1 |
| | | MMP16 | FGFR2 | GATA2, |
| | | | | CEACAM7, |
| | | | | OGN, AGTR1 |
| | | | GATA2 | CEACAM7, OGN, |
| | | | | AGTR1 |
| | | | CEACAM7 | OGN, AGTR1 |
| | | | OGN | AGTR1 |
| | | FGFR2 | GATA2 | CEACAM7, OGN, |
| | | | | AGTR1 |
| | | | CEACAM7 | OGN, AGTR1 |
| | | | OGN | AGTR1 |
| | | GATA2 | CEACAM7 | OGN, AGTR1 |
| | | | OGN | AGTR1 |
| | | CEACAM7 | OGN | AGTR1 |
| | KLRG1 | MMP16 | FGFR | GATA2, |
| | | | | CEACAM7, |
| | | | | OGN, AGTR1 |
| | | | GATA2 | CEACAM7, OGN, |
| | | | | AGTR1 |
| | | | CEACAM7 | OGN, AGTR1 |
| | | | OGN | AGTR1 |
| | | FGFR2 | GATA2 | CEACAM7, OGN, |
| | | | | AGTR1 |
| | | | CEACAM7 | OGN, AGTR1 |
| | | | OGN | AGTR1 |
| | | GATA2 | CEACAM7 | OGN, AGTR1 |
| | | | OGN | AGTR1 |
| | | CEACAM7 | OGN | AGTR1 |
| | MMP16 | FGFR2 | GATA2 | CEACAM7, OGN, |
| | | | | AGTR1 |
| | | | CEACAM7 | OGN, AGTR1 |
| | | | OGN | AGTR1 |
| | | GATA2 | CEACAM7 | OGN, AGTR1 |
| | | | OGN | AGTR1 |
| | | CEACAM7 | OGN | AGTR1 |
| | FGFR2 | GATA2 | CEACAM7 | OGN, AGTR1 |
| | | | OGN | AGTR1 |
| | | CEACAM7 | OGN | AGTR1 |
| | GATA2 | CEACAM7 | OGN | AGTR1 |
| CD1C | HHEX | KLRG1 | MMP16 | FGFR2, GATA2, |
| | | | | CEACAM7, OGN, |
| | | | | AGTR1 |
| | | | FGFR2 | GATA2, |
| | | | | CEACAM7, |
| | | | | OGN, AGTR1 |
| | | | GATA2 | CEACAM7, OGN, |
| | | | | AGTR1 |
| | | | CEACAM7 | OGN, AGTR1 |
| | | | OGN | AGTR1 |
| | | MMP16 | FGFR2 | GATA2, |
| | | | | CEACAM7, |
| | | | | OGN, AGTR1 |
| | | | GATA2 | CEACAM7, OGN, |
| | | | | AGTR1 |
| | | | CEACAM7 | OGN, AGTR1 |
| | | | OGN | AGTR1 |
| | | FGFR2 | GATA2 | CEACAM7, OGN, |
| | | | | AGTR1 |
| | | | CEACAM7 | OGN, AGTR1 |
| | | | OGN | AGTR1 |
| | | GATA2 | CEACAM7 | OGN, AGTR1 |
| | | | OGN | AGTR1 |
| | | CEACAM7 | OGN | AGTR1 |
| | KLRG1 | MMP16 | FGFR2 | GATA2, |
| | | | | CEACAM7, |
| | | | | OGN, AGTR1 |
| | | | GATA2 | CEACAM7, OGN, |
| | | | | AGTR1 |
| | | | CEACAM7 | OGN, AGTR1 |
| | | | OGN | AGTR1 |
| | | FGFR2 | GATA2 | CEACAM7, OGN, |
| | | | | AGTR1 |
| | | | CEACAM7 | OGN, AGTR1 |
| | | | OGN | AGTR1 |
| | | GATA2 | CEACAM7 | OGN, AGTR1 |
| | | | OGN | AGTR1 |
| | | CEACAM7 | OGN | AGTR1 |
| | MMP16 | FGFR2 | GATA2 | CEACAM7, OGN, |
| | | | | AGTR1 |
| | | | CEACAM7 | OGN, AGTR1 |
| | | | OGN | AGTR1 |
| | | GATA2 | CEACAM7 | OGN, AGTR1 |
| | | | OGN | AGTR1 |
| | | CEACAM7 | OGN | AGTR1 |
| | FGFR2 | GATA2 | CEACAM7 | OGN, AGTR1 |
| | | | OGN | AGTR1 |
| | | CEACAM7 | OGN | AGTR1 |
| | GATA2 | CEACAM7 | OGN | AGTR1 |
| HHEX | KLRG1 | MMP16 | FGFR2 | GATA2, |
| | | | | CEACAM7, |
| | | | | OGN, AGTR1 |
| | | | GATA2 | CEACAM7, OGN, |
| | | | | AGTR1 |
| | | | CEACAM7 | OGN, AGTR1 |
| | | | OGN | AGTR1 |
| | | FGFR2 | GATA2 | CEACAM7, OGN, |
| | | | | AGTR1 |
| | | | CEACAM7 | OGN, AGTR1 |
| | | | OGN | AGTR1 |
| | | GATA2 | CEACAM7 | OGN, AGTR1 |
| | | | OGN | AGTR1 |
| | | CEACAM7 | OGN | AGTR1 |
| | MMP16 | FGFR2 | GATA2 | CEACAM7, OGN, |
| | | | | AGTR1 |
| | | | CEACAM7 | OGN, AGTR1 |
| | | | OGN | AGTR1 |
| | | GATA2 | CEACAM7 | OGN, AGTR1 |
| | | | OGN | AGTR1 |
| | | CEACAM7 | OGN | AGTR1 |
| | FGFR2 | GATA2 | CEACAM7 | OGN, AGTR1 |
| | | | OGN | AGTR1 |
| | | CEACAM7 | OGN | AGTR1 |
| | GATA2 | CEACAM7 | OGN | AGTR1 |
| KLRG1 | MMP16 | FGFR2 | GATA2 | CEACAM7, OGN, |
| | | | | AGTR1 |
| | | | CEACAM7 | OGN, AGTR1 |
| | | | OGN | AGTR1 |
| | | GATA2 | CEACAM7 | OGN, AGTR1 |
| | | | OGN | AGTR1 |
| | | CEACAM7 | OGN | AGTR1 |
| | FGFR2 | GATA2 | CEACAM7 | OGN, AGTR1 |
| | | | OGN | AGTR1 |
| | | CEACAM7 | OGN | AGTR1 |
| | GATA2 | CEACAM7 | OGN | AGTR1 |
| MMP16 | FGFR2 | GATA2 | CEACAM7 | OGN, AGTR1 |
| | | | OGN | AGTR1 |
| | | CEACAM7 | OGN | AGTR1 |
| | GATA2 | CEACAM7 | OGN | AGTR1 |
| FGFR2 | GATA2 | CEACAM7 | OGN | AGTR1 |

[0098] By way of an illustrative example, in some instances of the present invention at least 6 hypoxia biomarkers may be measured, wherein the at least 6 hypoxia biomarkers comprise, consist or consist essentially of ARNTL, CEACAM7, GATA2, HHEX, KLRG1, and OGN.

[0099] In these examples, the indicator-determining methods suitably include determining a pair of biomarker values, wherein each biomarker value is a value measured or derived for at least one corresponding hypoxic biomarker of the subject and is at least partially indicative of a concentration of the hypoxic biomarker in a sample taken from the subject. The biomarker values are typically used to determine a derived biomarker value using the pair of biomarker values, wherein the derived biomarker value is indicative of a ratio of concentrations of the pair of hypoxic biomarkers. Thus, if the biomarker values denote the concentrations of the hypoxic biomarkers, then the derived biomarker value will be based on a ratio of the biomarker values. However, if the biomarker values are related to the concentrations of the biomarkers, for example if they are logarithmically related by virtue of the biomarker values being based on PCR cycle times, or the like, then the biomarker values may be combined in some other manner, such as by subtracting the cycle times to determine a derived biomarker value indicative of a ratio of the concentrations of the hypoxic biomarkers.

[0100] The derived biomarker value is then used to determine the indicator, either by using the derived biomarker value as an indicator value, or by performing additional processing, such as comparing the derived biomarker value to a reference or the like, as will be described in more detail below.

[0101] In some embodiments in which pairs of hypoxia biomarkers are used to determine a derived biomarker value, one biomarker of a biomarker pair is selected from Group 1 hypoxia biomarkers and the other is selected from Group 2 hypoxia biomarkers, wherein an individual Group 1 hypoxia biomarker is an expression product of a gene selected from the group consisting of: ARNTL, CD1C, HHEX, KLRG1, MMP16, FGFR2, GATA2, CEACAM7, OGN, and AGTR1; and wherein an individual Group 2 hypoxia biomarker is an expression product of G9a.

[0102] The derived biomarker values could be combined using a combining function such as an additive model; a linear model; a support vector machine; a neural network model; a tree-learning method (e.g., random forest model); a regression model; a genetic algorithm; an annealing algorithm; a weighted sum; a nearest neighbor model; an ensemble method (e.g., bagging, boosting weighted averaging); and a probabilistic model. In some embodiments, biomarker values are measured or derived for a Group 1 hypoxia biomarker and for a Group 2 hypoxia biomarker, and the indicator is determined by combining the biomarker values.

[0103] In some embodiments, the indicator is compared to an indicator reference, with a likelihood being determined in accordance with results of the comparison. The indicator reference may be derived from indicators determined for a number of individuals in a reference population. The reference population typically includes individuals having different characteristics, such as a plurality of individuals of different sexes; and/or ethnicities, with different groups being defined based on different characteristics, with the subject's indicator being compared to indicator references derived from individuals with similar characteristics. The reference population can also include a plurality of healthy individuals, a plurality of individuals with hypoxic condition (e.g., hypoxic cancer), a plurality of individuals with a non-hypoxic G9a-associated disease or condition, a plurality of individuals showing clinical signs of a hypoxic condition, a plurality of individuals showing clinical signs of a non-hypoxic G9a associated disease or condition.

[0104] The indicator can also be used for determining a likelihood of the subject having a first or second condition, wherein the first condition is a hypoxic condition (e.g., a hypoxic cancer) and the second condition is a normoxic condition; in other words, to distinguish between these conditions. In this case, this would typically be achieved by comparing the indicator to first and second indicator references, the first and second indicator references being indicative of first and second conditions and determining the likelihood in accordance with the results of the comparison. In particular, this can include determining first and second indicator probabilities using the results of the comparisons and combining the first and second indicator probabilities, for example using a Bayes method, to determine a condition probability corresponding to the likelihood of the subject having one of the conditions. In this situation the first and second conditions could include a hypoxic cancer and another non-hypoxic cancer, or hypoxia and normoxia. In this case, the first and second indicator references are distributions of indicators determined for first and second groups of a reference population, the first and second group consisting of individuals diagnosed with the first or second condition respectively.

[0105] In specific embodiments, the indicator-determining methods of the present invention are performed using at least one electronic processing device, such as a suitably programmed computer system or the like. In this case, the electronic processing device typically obtains at least one measured biomarker values, either by receiving these from a measuring or other quantifying device, or by retrieving these from a database or the like. The processing device then determines a first derived biomarker value indicative of a first hypoxia biomarker. and optionally, a second derived biomarker value indicative of a second hypoxia biomarker. In some of the same embodiments and other embodiments, the first derived biomarker value is value indicative of a ratio of first and second hypoxia biomarkers. In instances where more than one biomarker value is derived, the processing device may then determine the indicator by combining the first and second (and optionally third, fourth, fifth, etc.) derived biomarker values, as appropriate.

[0106] The processing device can then generate a representation of the indicator, for example by generating an alphanumeric indication of the indicator, a graphical indication of a comparison of the indicator to one or more indicator references or an alphanumeric indication of a likelihood of the subject having at least one medical condition.

[0107] The indicator-determining methods of the present invention typically include obtaining a sample from a subject, who typically has at least one clinical sign of a hypoxic condition (e.g., a hypoxic cancer), wherein the sample includes one or more hypoxia biomarkers (e.g., polynucleotide or polypeptide expression products of hypoxia genes) and quantifying at least two (e.g., 2, 3, 4, 5, 6, 7, 8, 9, 10 or more) of the hypoxia biomarkers within the sample to determine biomarker values. This can be achieved using any suitable technique, and will depend on the nature of the hypoxia biomarkers. Suitably, an individual measured or derived hypoxia biomarker value corresponds to the level, abundance or amount of a respective hypoxia biomarker or to a function that is applied to that level or amount. As used herein the terms “level”, “abundance” and “amount” are used interchangeably herein to refer to a quantitative amount (e.g., weight or moles), a semi-quantitative amount, a relative amount (e.g., weight % or mole % within class), a concentration, and the like. Thus, these terms encompass absolute or relative amounts or concentrations of hypoxia biomarkers in a sample. For example, if the indicator in some embodiments of the indicator-determining method of the present invention, which uses a plurality of hypoxia biomarkers, is based on a ratio of concentrations of the polynucleotide expression products, this process would typically include quantifying polynucleotide expression products by amplifying at least some polynucleotide expression products in the sample, determining an amplification amount representing a degree of amplification required to obtain a defined level of each of a pair of polynucleotide expression products and determining the indicator by determining a difference between the amplification amounts. In this regard, the amplification amount is generally a cycle time, a number of cycles, a cycle threshold and an amplification time. For example, in some embodiments the method includes determining a first derived biomarker value by determining the amplification amount of a first polynucleotide expression product, determining a second derived biomarker value by determining the amplification amounts of a second polynucleotide expression product, and determining the indicator by combining the first and second derived biomarker values.

[0108] In some embodiments, the presence or absence of a hypoxic condition (e.g., a hypoxic cancer) or prognosis for a disease or condition that is associated with hypoxia in a subject is established by determining two or more hypoxic biomarker values, wherein a hypoxic biomarker value is indicative of a value derived for hypoxia biomarkers in a subject or in a sample taken from the subject. These biomarkers are referred to herein as “sample hypoxia biomarkers”. In accordance with the present invention, a sample hypoxia biomarker corresponds to a reference hypoxia biomarker (also referred to herein as a “corresponding hypoxia biomarker”). By “corresponding hypoxia biomarker” is meant a hypoxia biomarker that is structurally and/or functionally similar to a reference hypoxia biomarker as set forth for example in Table 5. Representative corresponding hypoxia biomarkers include expression products of allelic variants (same locus), homologues (different locus), and orthologues (different organism) of reference hypoxia biomarker genes. Nucleic acid variants of reference hypoxia biomarker genes and encoded hypoxia biomarker polynucleotide expression products can contain nucleotide substitutions, deletions, inversions and/or insertions. Variation can occur in either or both the coding and non-coding regions. The variations can produce both conservative and non-conservative amino acid substitutions (as compared in the encoded product). For nucleotide sequences, conservative variants include those sequences that, because of the degeneracy of the genetic code, encode the amino acid sequence of a reference hypoxia polypeptide.

[0109] Generally, variants of a particular hypoxia biomarker gene or polynucleotide will have at least about 40%, 45%, 50%, 51%, 52%, 53%, 54%, 55%, 56%, 57%, 58%, 59% 60%, 61%, 62%, 63%, 64%, 65%, 66%, 67%, 68%, 69% 70%, 71%, 72%, 73%, 74%, 75%, 76%, 77%, 78%, 79%, 80%, 81%, 82%, 83%, 84%, 85%, 86%, 87%, 88%, 89%, 90%, 91%, 92%, 93%, 94%, 95%, 96%, 97%, 98%, 99% or more sequence identity to that particular nucleotide sequence as determined by sequence alignment programs known in the art using default parameters. In some embodiments, the hypoxia biomarker gene or polynucleotide displays at least about 40%, 45%, 50%, 51%, 52%, 53%, 54%, 55%, 56%, 57%, 58%, 59% 60%, 61%, 62%, 63%, 64%, 65%, 66%, 67%, 68%, 69% 70%, 71%, 72%, 73%, 74%, 75%, 76%, 77%, 78%, 79%, 80%, 81%, 82%, 83%, 84%, 85%, 86%, 87%, 88%, 89%, 90%, 91%, 92%, 93%, 94%, 95%, 96%, 97%, 98%, 99% or more sequence identity to any one of the hypoxia biomarkers listed in Table 5.

TABLE 5

| Gene biomarker/GenBank Acc. No | SEQ ID NO: |
|---|---|
| ARNTL/NM_001178 | 1 |
| CD1C/NM_001178 | 2 |
| HHEX/NM_002729 | 3 |
| KLRG1/NM_001329099 | 4 |
| MMP16/NM_005941 | 5 |
| FGFR2/NM_000141 | 6 |
| GATA2/NM_001145661 | 7 |
| CEACAM7/NM_001291485 | 8 |
| OGN/NM_024416 | 9 |
| AGTR1/NM_000685 | 10 |
| ARMCX1/NM_016608 | 11 |
| C10orf25/XM_498436 | 12 |
| C14orf169/XM_012963799 | 13 |
| C18orf34/NM_001105528 | 14 |
| C18orf62/NM_001037331 | 15 |
| C1QTNF9/NM_001303137 | 16 |
| C2orf76/NM_001017927 | 17 |
| C6orf165/NM_001031743 | 18 |
| C7orf45/NM_145268 | 19 |
| C7orf62/NM_152706 | 20 |
| C9orf131/NM_001040412 | 21 |
| C9orf85/NM_182505 | 22 |
| CA10/NM_001082533 | 23 |
| CAPNS2/NM_032330 | 24 |
| CCDC121/NM_001142683 | 25 |
| CCDC141/NM_001316745 | 26 |
| CDH10/NM_006727 | 27 |
| CDH11/NM_001308392 | 28 |
| CEP170P1/NR_003135 | 29 |
| CYTIP/NM_004288 | 30 |
| DBF4/NM_001180360 | 31 |
| DDX56/NM_019082 | 32 |
| DPPA2/NM_138815 | 33 |
| DPPA3P2/NC_000014 | 34 |
| DTX2/NM_001102594 | 35 |
| EIF4G2/NM_001172705 | 36 |
| ELMO1/NM_001206480 | 37 |
| ELOVL3/NM_152310 | 38 |
| ENAM/NM_031889 | 39 |
| FAM172BP/NR_036433 | 40 |
| FCGR1A/NM_000566 | 41 |
| FFAR2 | 42 |
| FGF12/NM_005306 | 43 |
| FLJ42102/NR_038862 | 44 |
| FLJ44838/NM_001082575 | 45 |
| FLJ45721/NM_207490 | 46 |
| FN1/NM_001306129 | 47 |
| FOXP2/NM_014491 | 48 |
| GDI2/NM_001494 | 49 |
| GGTLC2/NM_199127 | 50 |
| GK2/NM_033214 | 51 |
| GPR78/NM_080819 | 52 |
| HARBI1/NM_173811 | 53 |
| HEMGN/NM_197978 | 54 |
| HIST1H2AA/NM_170745 | 55 |
| HMGN2/NM_005517 | 56 |
| HMGN2P28/NC_000006 | 57 |
| HMGN2P46/NR_022014 | 58 |
| HOXC13/NM_017410 | 59 |
| HPDL/NM_032756 | 60 |
| HRCT1/NM_001039792 | 61 |
| HRH1/NM_000861 | 62 |
| HS3ST3B1/NM_006041 | 63 |
| HSD3B2/NM_000198 | 64 |
| ICA1L/NM_001288622 | 65 |
| IDO2/NM_194294 | 66 |
| IL10/NM_000572 | 67 |
| IL17A/NM_002190 | 68 |
| IL18/NM_001243211 | 69 |
| IL1B/NM_000576 | 70 |
| KARS/NM_001130089 | 71 |
| KBTBD6/NM_152903 | 72 |
| KCNA2/NM_001204269 | 73 |
| KLB/NM_175737 | 74 |
| KMO/NM_003679 | 75 |
| KRT10/NM_000421 | 76 |
| KRT222/NM_152349 | 77 |
| LCN1/NM_002297 | 78 |
| LIG4/NM_001098268 | 79 |
| LINC00312/NR_024065 | 80 |
| LINC00328/AL391382 | 81 |
| LINC00596/NR_024081 | 82 |
| LLPH/NM_032338 | 83 |
| LOC100049716/NR_122124 | 84 |
| LOC100287879/NR_033978 | 85 |
| LOC642947/NM_001039895 | 86 |
| LRRC37A5P/NR_034087 | 87 |
| LRRC53/XM_017003080 | 88 |
| LTA/NM_000595 | 89 |
| MEIG1/NM_001080836 | 90 |
| METTL2A/NM_181725 | 91 |
| MGAT2/NM_181725 | 92 |
| MILR1/NM_001085423 | 93 |
| MIR148A/NR_029597 | 94 |
| MIR218-1/NR_029631 | 95 |
| MIR34B/NR_029839 | 96 |
| MIR494/NR_030174 | 97 |
| MIR516B2/NR_030174 | 98 |
| MMP27/NM_022122 | 99 |
| MPP1/NM_002436 | 100 |
| MRPL30/NM_145212 | 101 |
| MUTYH/NM_012222 | 102 |
| MYH8/NM_002472 | 103 |
| NBLA00301/NR_003679 | 104 |
| NCRNA00185/NR_125733 | 105 |
| ND6/J01415.2 | 106 |
| NEFM/NM_001105541 | 107 |
| NEUROD1/NM_002500 | 108 |
| NONO/NM_001145408 | 109 |
| NPY5R/NM_001317091 | 110 |
| OCM/NM_001097622 | 111 |
| OCM2/NM_006188 | 112 |
| OR10A2/NM_001004460 | 113 |
| OR2A12/NM_001004135 | 114 |
| OR2D3/NM_001004684 | 115 |
| OR2M3/NM_001004689 | 116 |
| OR2T2/NM_001004136 | 117 |
| OR2T35/NM_001001827 | 118 |
| OR4D10/NM_001004705 | 119 |
| OR4D2/NM_001004707 | 120 |
| OR5J2/NM_001005492 | 121 |
| OR5M10/NM_001004741 | 122 |
| OR8H3/NM_001005201 | 123 |
| OR9G1/NM_001005213 | 124 |
| ORM2/NM_000608 | 125 |
| OTOG/NM_001277269 | 126 |
| PAGE2B/NM_001015038 | 127 |
| PLAG1/NM_001114634 | 128 |
| PRL/NM_000948 | 129 |
| PRPF8/NM_006445 | 130 |
| PSCA/NM_005672 | 131 |
| PTPN20A/NM_001042357 | 132 |
| RBM44/NM_001080504 | 133 |
| RBMY1F/NM_152585 | 134 |
| RFK/NM_018339 | 135 |
| RIMBP3/NM_015672 | 136 |
| RN18S1/NR_003286 | 137 |
| RN5S1/NR_023363 | 138 |
| RN7SK/NR_001445 | 139 |
| RN7SL1/NR_002715 | 140 |
| RNF152/NM_173557 | 141 |
| RNF185/NM_001135825 | 142 |
| RNPS1/NM_001286625 | 143 |
| RNU11/NR_004407 | 144 |
| RNU1-4/NR_004421 | 145 |
| RNU2-1/NR_002716 | 146 |
| RNU4-2/NR_003137 | 147 |
| RNU5F-1/NR_002753 | 148 |
| RNU6-2/NR_125730 | 149 |
| RNY1/NR_004391 | 150 |
| RP11-165H20.1/NM_015629 | 151 |
| RPL21P68/NG_010409 | 152 |
| RPS27AP17/NG_011207 | 153 |
| S1PR3/NM_005226 | 154 |
| SART1/NM_005146 | 155 |
| SDAD1/NM_001288983 | 156 |
| SEPP1/NM_005410 | 157 |
| SETD9/NM_153706 | 158 |
| SIGLEC14/NM_001098612 | 159 |
| SKAP1/NM_003726 | 160 |
| SLC36A3/NM_001145017 | 161 |
| SLC8A1/NM_001112800 | 162 |
| SLC9B1P2/NG_009550 | 163 |
| SLCO4C1/NM_180991 | 164 |
| SMNDC1/NM_005871 | 165 |
| SNORA1/NR_003026 | 166 |
| SNORA72/NR_002581 | 167 |
| SNORA75/NR_002921 | 168 |
| SNORD114-2/NR_003194 | 169 |
| SNORD115-10/NR_003302 | 170 |
| SNORD116-19/NR_001290 | 171 |
| SNORD18A/NR_002441 | 172 |
| SNORD3B1/NR_003271 | 173 |
| SPOCK3/NM_001040159 | 174 |
| ST6GAL1/NM_173216 | 175 |
| STAMBPL1/NM_020799 | 176 |
| TAF1D/NM_024116 | 177 |
| TAS2R14/NM_023922 | 178 |
| TBCCD1/NM_001134415 | 179 |
| TCEB3B/NM_016427 | 180 |
| TMEM100/NM_001099640 | 181 |
| TMIGD1/NM_001099640 | 182 |
| ERBB2/NM_016272 | 183 |
| TUBB8/NM_177987 | 184 |
| UBD/NM_006398 | 185 |
| UGT2B17/NM_001077 | 186 |
| UQCRFS1/NM_006003 | 187 |
| VNN1/NM_004666 | 188 |
| ZC3HC1/NM_016478 | 189 |
| ZCCHC12/NM_173798 | 190 |
| ZNF222/NM_001129996 | 191 |
| ZNF259/NM_001129996 | 192 |
| ZNF439/NM_001348718 | 193 |
| ZNF487P/NR_026693 | 194 |
| ZNF569/NM_152484 | 195 |
| ZNF678/NM_178549 | 196 |
| ZNF684/NM_152373 | 197 |
| ZNF716/NM_001159279 | 198 |
| ZNF718/NM_001039127 | 199 |
| ZNRF3/NM_001206998 | 200 |
| ZSCAN29/NM_152455 | 201 |

[0110] Corresponding hypoxic biomarkers also include amino acid sequences that display substantial sequence similarity or identity to the amino acid sequence of a reference hypoxia biomarker polypeptide. In general, an amino acid sequence that corresponds to a reference amino acid sequence will display at least about 50, 51, 52, 53, 54, 55, 56, 57, 58, 59, 60, 61, 62, 63, 64, 65, 66, 67, 68, 69, 70, 71, 72, 73, 74, 75, 76, 77, 78, 79, 80, 81, 82, 83, 84, 85, 86, 97, 88, 89, 90, 91, 92, 93, 94, 95, 96, 97, 98, 99% or even up to 100% sequence similarity or identity to a reference amino acid sequence selected from any one of the sequences listed in Table 6.

[0111] In some embodiments, calculations of sequence similarity or sequence identity between sequences are performed as follows:

[0112] To determine the percentage identity of two amino acid sequences, or of two nucleic acid sequences, the sequences are aligned for optimal comparison purposes (e.g., gaps can be introduced in one or both of a first and a second amino acid or nucleic acid sequence for optimal alignment and non-homologous sequences can be disregarded for comparison purposes). In some embodiments, the length of a reference sequence aligned for comparison purposes is at least 30%, usually at least 40%, more usually at least 50%, 60%, and even more usually at least 70%, 80%, 90%, 100% of the length of the reference sequence. The amino acid residues or nucleotides at corresponding amino acid positions or nucleotide positions are then compared. When a position in the first sequence is occupied by the same amino acid residue or nucleotide at the corresponding position in the second sequence, then the molecules are identical at that position. For amino acid sequence comparison, when a position in the first sequence is occupied by the same or similar amino acid residue (i.e., conservative substitution) at the corresponding position in the second sequence, then the molecules are similar at that position.

[0113] The percentage identity between the two sequences is a function of the number of identical amino acid residues shared by the sequences at individual positions, taking into account the number of gaps, and the length of each gap, which need to be introduced for optimal alignment of the two sequences. By contrast, the percentage similarity between the two sequences is a function of the number of identical and similar amino acid residues shared by the sequences at individual positions, taking into account the number of gaps, and the length of each gap, which need to be introduced for optimal alignment of the two sequences.

TABLE 6

| Peptide biomarker | SEQ ID NO: |
|---|---|
| ARNTL/O00327 | 202 |
| CD1C/P29017 | 203 |
| HHEX/Q03014 | 204 |
| KLRG1/Q96E93 | 205 |
| MMP16/P51512 | 206 |
| FGFR2/NP_000132 | 207 |
| GATA2/P23769 | 208 |
| CEACAM7/Q14002 | 209 |
| OGN/P20774 | 210 |
| AGTR1/P30556 | 211 |
| ARMCX1/Q9P291 | 212 |
| C10orf25/Q5T742 | 213 |
| C14orf169/NP_078920 | 214 |
| C18orf34/Q5BJE1 | 215 |
| C18orf62/Q3B7S5 | 216 |
| C1QTNF9/P0C862 | 217 |
| C2orf76/Q3KRA6 | 218 |
| C6orf165/Q8IYR0 | 219 |
| C7orf45/Q8WWF3 | 220 |
| C7orf62/Q8TBZ9 | 221 |
| C9orf131/Q5VYM1 | 222 |
| C9orf85/Q96MD7 | 223 |
| CA10/Q9NS85 | 224 |
| CAPNS2/Q96L46 | 225 |
| CCDC121/Q6ZUS5 | 226 |
| CCDC141/B8ZZB3 | 227 |
| CDH10/Q9Y6N8 | 228 |
| CDH11/P55287 | 229 |
| CEP170P1/XP_011542644 | 230 |
| CYTIP/O60759 | 231 |
| DBF4/P32325 | 232 |
| DDX56/Q9NY93 | 233 |
| DPPA2/Q7Z7J5 | 234 |
| DTX2/Q86UW9 | 235 |
| EIF4G2/P78344 | 236 |
| ELMO1/Q92556 | 237 |
| ELOVL3/Q9HB03 | 238 |
| ENAM/Q9NRM1 | 239 |
| FAM172BP/A6NC97 | 240 |
| FCGR1A/P12314 | 241 |
| FFAR2/O15552 | 242 |
| FGF12/O15552 | 243 |
| FLJ42102/Q6ZVU0 | 244 |
| FLJ44838/A6NFN3 | 245 |
| FLJ45721/Q6ZS92 | 246 |
| FN1/P02751 | 247 |
| FOXP2/O15409 | 248 |
| GDI2/P50395 | 249 |
| GGTLC2/Q14390 | 250 |
| GK2/Q14410 | 251 |
| GPR78/Q96P69 | 252 |
| HARBI1/Q96MB7 | 253 |
| HEMGN/Q9BXL5 | 254 |
| HIST1H2AA/Q96QV6 | 255 |
| HMGN2/P05204 | 256 |
| HOXC13/P31276 | 257 |
| HPDL/Q96IR7 | 258 |
| HRCT1/Q6UXD1 | 259 |
| HRH1/P35367 | 260 |
| HS3ST3B1/Q9Y662 | 261 |
| HSD3B2/P26439 | 262 |
| ICA1L/Q8NDH6 | 263 |
| IDO2/Q6ZQW0 | 264 |
| IL10/P22301 | 265 |
| IL17A/Q16552 | 266 |
| IL18/Q14116 | 267 |
| IL1B/P01584 | 268 |
| KARS/Q15046 | 269 |
| KBTBD6/Q86V97 | 270 |
| KCNA2/P16389 | 271 |
| KLB/Q86Z14 | 272 |
| KMO/015229 | 273 |
| KRT10/P13645 | 274 |
| KRT222/Q8N1A0 | 275 |
| LCN1/P31025 | 276 |
| LIG4/P49917 | 277 |
| LINC00312/Q9Y6C7 | 278 |
| LINC00596/Q86U02 | 279 |
| LLPH/Q9BRT6 | 280 |
| LRRC37A5P/Q49AS3 | 281 |
| LRRC53/A6NM62 | 282 |
| LTA/P01374 | 283 |
| MEIG1/Q5JSS6 | 284 |
| METTL2A/Q96IZ6 | 285 |
| MGAT2/Q96IZ6 | 286 |
| MILR1/Q7Z6M3 | 287 |
| MMP27/Q9H306 | 288 |
| MPP1/Q00013 | 289 |
| MRPL30/Q8TCC3 | 290 |
| MUTYH/Q9UIF7 | 291 |
| MYH8/P13535 | 292 |
| ND6/P03923 | 293 |
| NEFM/Q9UK51 | 294 |
| NEUROD1/Q13562 | 295 |
| NONO/Q15233 | 296 |
| NPCDR1/Q9BY65 | 297 |
| NPY5R/Q15761 | 298 |
| OCM/P0CE72 | 299 |
| OCM2/P0CE71 | 300 |
| OR10A2/Q9H208 | 301 |
| OR2A12/Q8NGT7 | 302 |
| OR2D3/Q8NGH3 | 303 |
| OR2M3/Q8NG83 | 304 |
| OR2T2/Q6IF00 | 305 |
| OR2T35/Q8NGX2 | 306 |
| OR4D10/Q8NGI6 | 307 |
| OR4D2/P58180 | 308 |
| OR5J2/Q8NH18 | 309 |
| OR5M10/Q6IEU7 | 310 |
| OR8H3/Q8N146 | 311 |
| OR9G1/Q8NH87 | 312 |
| ORM2/P19652 | 313 |
| OTOG/Q6ZRI0 | 314 |
| PAGE2B/Q5JRK9 | 315 |
| PLAG1/Q6DJT9 | 316 |
| PRL/P01236 | 317 |
| PRPF8/Q6P2Q9 | 318 |
| PSCA/D3DWI6 | 319 |
| PTPN20A/Q4JDL3 | 320 |
| RBM44/Q6ZP01 | 321 |
| RBMY1C/P0DJD4 | 322 |
| RBMY1F/Q15415 | 323 |
| RFK/Q969G6 | 324 |
| RIMBP3/Q9UFD9 | 325 |
| RNF152/Q8N8N0 | 326 |
| RNF185/Q96GF1 | 327 |
| RNPS1/Q15287 | 328 |
| RP11-165H20.1/Q8WWY3 | 329 |
| S1PR3/Q99500 | 330 |
| SART1/O43290 | 331 |
| SDAD1/Q9NVU7 | 332 |
| SEPP1/P49908 | 333 |
| SETD9/Q8NE22 | 334 |
| SIGLEC14/Q08ET2 | 335 |
| SKAP1/Q86WV1 | 336 |
| SLC36A3/Q495N2 | 337 |
| SLC8A1/P32418 | 338 |
| SLCO4C1/Q6ZQN7 | 339 |
| SMNDC1/O75940 | 340 |
| SPOCK3/Q9BQ16 | 341 |
| ST6GAL1/P15907 | 342 |
| STAMBPL1/Q96FJ0 | 343 |
| TAF1D/Q9H5J8 | 344 |
| TAS2R14/Q9NYV8 | 345 |
| TBCCD1/Q9NVR7 | 346 |
| TCEB3B/Q8IYF1 | 347 |
| TMEM100/Q9NV29 | 348 |
| TMIGD1/Q9NV29 | 349 |
| TOB2/Q14106 | 350 |
| TUBB8/Q3ZCM7 | 351 |
| UBD/O15205 | 352 |
| UGT2B17/O75795 | 353 |
| UQCRFS1/P47985 | 354 |
| VNN1/O95497 | 355 |
| ZC3HC1/Q86WB0 | 356 |
| ZCCHC12/Q6PEW1 | 357 |
| ZNF222/Q9UK12 | 358 |
| ZNF259/O7531 | 359 |
| ZNF439/Q8NDP4 | 360 |
| ZNF569/Q5MCW4 | 361 |
| ZNF678/Q5SXM1 | 362 |
| ZNF684/Q5T5D7 | 363 |
| ZNF716/A6NP11 | 364 |
| ZNF718/Q3SXZ3 | 365 |
| ZNRF3/Q9ULT6 | 366 |
| ZSCAN29/Q8IWY8 | 367 |

[0114] The comparison of sequences and determination of percentage identity or percentage similarity between sequences can be accomplished using a mathematical algorithm. In certain embodiments, the percentage identity or similarity between amino acid sequences is determined using the Needleman and Wünsch, (1970, J. Mol. Biol. 48: 444-453) algorithm which has been incorporated into the GAP program in the GCG software package (available at http://www.gcg.com), using either a Blossum 62 matrix or a PAM250 matrix, and a gap weight of 16, 14, 12, 10, 8, 6, or 4 and a length weight of 1, 2, 3, 4, 5, or 6. In specific embodiments, the percent identity between nucleotide sequences is determined using the GAP program in the GCG software package (available at http://www.gcg.com), using a NWSgapdna.CMP matrix and a gap weight of 40, 50, 60, 70, or 80 and a length weight of 1, 2, 3, 4, 5, or 6. A non-limiting set of parameters (and the one that should be used unless otherwise specified) includes a Blossum 62 scoring matrix with a gap penalty of 12, a gap extend penalty of 4, and a frameshift gap penalty of 5.

[0115] In some embodiments, the percentage identity or similarity between amino acid or nucleotide sequences can be determined using the algorithm of E. Meyers and W. Miller (1989, Cabios, 4: 11-17) which has been incorporated into the ALIGN program (version 2.0), using a PAM120 weight residue table, a gap length penalty of 12 and a gap penalty of 4.

[0116] The nucleic acid and protein sequences described herein can be used as a “query sequence” to perform a search against public databases to, for example, identify other family members or related sequences. Such searches can be performed using the NBLAST and XBLAST programs (version 2.0) of Altschul, et al., (1990, J Mol Biol., 215: 403-10). BLAST nucleotide searches can be performed with the NBLAST program, score=100, wordlength=12 to obtain nucleotide sequences homologous to 53010 nucleic acid molecules of the invention. BLAST protein searches can be performed with the XBLAST program, score=50, wordlength=3 to obtain amino acid sequences homologous to protein molecules of the invention. To obtain gapped alignments for comparison purposes, Gapped BLAST can be utilized as described in Altschul et al., (1997, Nucleic Acids Res, 25: 3389-3402). When utilizing BLAST and Gapped BLAST programs, the default parameters of the respective programs (e.g., XBLAST and NBLAST) can be used.

[0117] Corresponding hypoxia biomarker polynucleotides also include nucleic acid sequences that hybridize to reference hypoxia biomarker polynucleotides, or to their complements, under stringency conditions described below. As used herein, the term “hybridizes under low stringency, medium stringency, high stringency, or very high stringency conditions” describes conditions for hybridization and washing. “Hybridization” is used herein to denote the pairing of complementary nucleotide sequences to produce a DNA-DNA hybrid or a DNA-RNA hybrid. Complementary base sequences are those sequences that are related by the base-pairing rules. In DNA, A pairs with T and C pairs with G. In RNA, U pairs with A and C pairs with G. In this regard, the terms “match” and “mismatch” as used herein refer to the hybridization potential of paired nucleotides in complementary nucleic acid strands. Matched nucleotides hybridize efficiently, such as the classical A-T and G-C base pair mentioned above. Mismatches are other combinations of nucleotides that do not hybridize efficiently.

[0118] Guidance for performing hybridization reactions can be found in Ausubel et al., (1998, supra), Sections 6.3.1-6.3.6. Aqueous and non-aqueous methods are described in that reference and either can be used. Reference herein to low stringency conditions include and encompass from at least about 1% v/v to at least about 15% v/v formamide and from at least about 1 M to at least about 2 M salt for hybridization at 42° C., and at least about 1 M to at least about 2 M salt for washing at 42° C. Low stringency conditions also may include 1% Bovine Serum Albumin (BSA), 1 mM EDTA, 0.5 M NaHPO₄ (pH 7.2), 7% SDS for hybridization at 65° C., and (i) 2×SSC, 0.1% SDS; or (ii) 0.5% BSA, 1 mM EDTA, 40 mM NaHPO₄ (pH 7.2), 5% SDS for washing at room temperature. One embodiment of low stringency conditions includes hybridization in 6× sodium chloride/sodium citrate (SSC) at about 45° C., followed by two washes in 0.2×SSC, 0.1% SDS at least at 50° C. (the temperature of the washes can be increased to 55° C. for low stringency conditions). Medium stringency conditions include and encompass from at least about 16% v/v to at least about 30% v/v formamide and from at least about 0.5 M to at least about 0.9 M salt for hybridization at 42° C., and at least about 0.1 M to at least about 0.2 M salt for washing at 55° C. Medium stringency conditions also may include 1% Bovine Serum Albumin (BSA), 1 mM EDTA, 0.5 M NaHPO₄ (pH 7.2), 7% SDS for hybridization at 65° C., and (i) 2×SSC, 0.1% SDS; or (ii) 0.5% BSA, 1 mM EDTA, 40 mM NaHPO₄ (pH 7.2), 5% SDS for washing at 60-65° C. One embodiment of medium stringency conditions includes hybridizing in 6×SSC at about 45° C., followed by one or more washes in 0.2×SSC, 0.1% SDS at 60° C. High stringency conditions include and encompass from at least about 31% v/v to at least about 50% v/v formamide and from about 0.01 M to about 0.15 M salt for hybridization at 42° C., and about 0.01 M to about 0.02 M salt for washing at 55° C. High stringency conditions also may include 1% BSA, 1 mM EDTA, 0.5 M NaHPO₄ (pH 7.2), 7% SDS for hybridization at 65° C., and (i) 0.2×SSC, 0.1% SDS; or (ii) 0.5% BSA, 1 mM EDTA, 40 mM NaHPO₄ (pH 7.2), 1% SDS for washing at a temperature in excess of 65° C. One embodiment of high stringency conditions includes hybridizing in 6×SSC at about 45° C., followed by one or more washes in 0.2×SSC, 0.1% SDS at 65° C.

[0119] In certain embodiments, a corresponding hypoxia biomarker polynucleotide is one that hybridizes to a disclosed nucleotide sequence under very high stringency conditions. One embodiment of very high stringency conditions includes hybridizing 0.5 M sodium phosphate, 7% SDS at 65° C., followed by one or more washes at 0.2×SSC, 1% SDS at 65° C.

[0120] Other stringency conditions are well known in the art and a skilled addressee will recognize that various factors can be manipulated to optimize the specificity of the hybridization. Optimization of the stringency of the final washes can serve to ensure a high degree of hybridization. For detailed examples, see Ausubel et al., supra at pages 2.10.1 to 2.10.16 and Sambrook et al. (1989, supra) at sections 1.101 to 1.104.

[0121] 2.1 Sample Preparation

[0122] Generally, a sample is processed prior to hypoxia biomarker detection or quantification. For example, nucleic acid and/or proteins may be extracted, isolated, and/or purified from a sample prior to analysis. Various DNA, mRNA, and/or protein extraction techniques are well known to those skilled in the art. Processing may include centrifugation, ultracentrifugation, ethanol precipitation, filtration, fractionation, resuspension, dilution, concentration, etc. In some embodiments, methods and systems provide analysis (e.g., quantification of RNA or protein biomarkers) from raw sample (e.g., biological fluid such as blood, serum, etc.) without or with limited processing.

[0123] Methods may comprise steps of homogenizing a sample in a suitable buffer, removal of contaminants and/or assay inhibitors, adding a hypoxia biomarker capture reagent (e.g., a magnetic bead to which is linked an oligonucleotide complementary to a target hypoxia nucleic acid biomarker), incubated under conditions that promote the association (e.g., by hybridization) of the target biomarker with the capture reagent to produce a target biomarker:capture reagent complex, incubating the target biomarker:capture complex under target biomarker-release conditions. In some embodiments, multiple hypoxia biomarkers are isolated in each round of isolation by adding multiple hypoxia biomarkers capture reagents (e.g., specific to the desired biomarkers) to the solution. For example, multiple hypoxia biomarker capture reagents, each comprising an oligonucleotide specific for a different target hypoxia biomarker can be added to the sample for isolation of multiple hypoxia biomarker. It is contemplated that the methods encompass multiple experimental designs that vary both in the number of capture steps and in the number of target hypoxia biomarker captured in each capture step. In some embodiments, capture reagents are molecules, moieties, substances, or compositions that preferentially (e.g., specifically and selectively) interact with a particular biomarker sought to be isolated, purified, detected, and/or quantified. Any capture reagent having desired binding affinity and/or specificity to the particular hypoxia biomarker can be used in the present technology.

[0124] For example, the capture reagent can be a macromolecule such as a peptide, a protein (e.g., an antibody or receptor), an oligonucleotide, a nucleic acid (e.g., nucleic acids capable of hybridizing with the hypoxia biomarkers), vitamins, oligosaccharides, carbohydrates, lipids, or small molecules, or a complex thereof. As illustrative and non-limiting examples, an avidin target capture reagent may be used to isolate and purify targets comprising a biotin moiety, an antibody may be used to isolate and purify targets comprising the appropriate antigen or epitope, and an oligonucleotide may be used to isolate and purify a complementary oligonucleotide.

[0125] Any nucleic acids, including single-stranded and double-stranded nucleic acids, that are capable of binding, or specifically binding, to a target hypoxia biomarker can be used as the capture reagent. Examples of such nucleic acids include DNA, RNA, aptamers, peptide nucleic acids, and other modifications to the sugar, phosphate, or nucleoside base. Thus, there are many strategies for capturing a target and accordingly many types of capture reagents are known to those in the art.

[0126] In addition, hypoxia biomarker capture reagents may comprise a functionality to localize, concentrate, aggregate, etc. the capture reagent and thus provide a way to isolate and purify the target hypoxia biomarker when captured (e.g., bound, hybridized, etc.) to the capture reagent (e.g., when a target:capture reagent complex is formed). For example, in some embodiments the portion of the capture reagent that interacts with the hypoxia biomarker (e.g., an oligonucleotide) is linked to a solid support (e.g., a bead, surface, resin, column, and the like) that allows manipulation by the user on a macroscopic scale. Often, the solid support allows the use of a mechanical means to isolate and purify the target:capture reagent complex from a heterogeneous solution. For example, when linked to a bead, separation is achieved by removing the bead from the heterogeneous solution, e.g., by physical movement. In embodiments in which the bead is magnetic or paramagnetic, a magnetic field is used to achieve physical separation of the capture reagent (and thus the target hypoxia biomarker) from the heterogeneous solution.

[0127] The hypoxia biomarkers may be quantified or detected using any suitable technique. In specific embodiments, the hypoxia biomarkers are quantified using reagents that determine the level, abundance or amount of individual hypoxia biomarkers. Non-limiting reagents of this type include reagents for use in nucleic acid- and protein-based assays.

[0128] 2.2 Quantification or Detection of Nucleic Acid Biomarkers

[0129] In illustrative nucleic acid-based assays, nucleic acid is isolated from cells contained in the biological sample according to standard methodologies (Sambrook, et al., 1989, supra; and Ausubel et al., 1994, supra). The nucleic acid is typically fractionated (e.g., poly A⁺ RNA) or whole cell RNA. Where RNA is used as the subject of detection, it may be desired to convert the RNA to a complementary DNA. In some embodiments, the nucleic acid is amplified by a template-dependent nucleic acid amplification technique. A number of template dependent processes are available to amplify the hypoxia biomarker sequences present in a given template sample. An exemplary nucleic acid amplification technique is the polymerase chain reaction (referred to as PCR), which is described in detail in U.S. Pat. Nos. 4,683,195, 4,683,202 and 4,800,159, Ausubel et al. (supra), and in Innis et al., (“PCR Protocols”, Academic Press, Inc., San Diego Calif., 1990). Briefly, in PCR, two primer sequences are prepared that are complementary to regions on opposite complementary strands of the biomarker sequence. An excess of deoxynucleotide triphosphates are added to a reaction mixture along with a DNA polymerase, e.g., Taq polymerase. If a cognate hypoxia biomarker sequence is present in a sample, the primers will bind to the biomarker and the polymerase will cause the primers to be extended along the biomarker sequence by adding on nucleotides. By raising and lowering the temperature of the reaction mixture, the extended primers will dissociate from the biomarker to form reaction products, excess primers will bind to the biomarker and to the reaction products and the process is repeated. A reverse transcriptase PCR amplification procedure may be performed in order to quantify the amount of mRNA amplified. Methods of reverse transcribing RNA into cDNA are well known and described in Sambrook et al., 1989, supra. Alternative methods for reverse transcription utilize thermostable, RNA-dependent DNA polymerases. These methods are described in WO 90/07641. Polymerase chain reaction methodologies are well known in the art. In specific embodiments in which whole cell RNA is used, cDNA synthesis using whole cell RNA as a sample produces whole cell cDNA.

[0130] In certain advantageous embodiments, the template-dependent amplification involves quantification of transcripts in real-time. For example, RNA or DNA may be quantified using the real-time PCR technique (Higuchi, 1992, et al., Biotechnology 10: 413-417). By determining the concentration of the amplified products of the target DNA in PCR reactions that have completed the same number of cycles and are in their linear ranges, it is possible to determine the relative concentrations of the specific target sequence in the original DNA mixture. If the DNA mixtures are cDNAs synthesized from RNAs isolated from different tissues or cells, the relative abundance of the specific mRNA from which the target sequence was derived can be determined for the respective tissues or cells. This direct proportionality between the concentration of the PCR products and the relative mRNA abundance is only true in the linear range of the PCR reaction. The final concentration of the target DNA in the plateau portion of the curve is determined by the availability of reagents in the reaction mix and is independent of the original concentration of target DNA. In specific embodiments, multiplexed, tandem PCR (MT-PCR) is employed, which uses a two-step process for gene expression profiling from small quantities of RNA or DNA, as described for example in U.S. Pat. Appl. Pub. No. 20070190540. In the first step, RNA is converted into cDNA and amplified using multiplexed gene specific primers. In the second step each individual gene is quantitated by real time PCR. Real-time PCR is typically performed using any PCR instrumentation available in the art. Typically, instrumentation used in real-time PCR data collection and analysis comprises a thermal cycler, optics for fluorescence excitation and emission collection, and optionally a computer and data acquisition and analysis software.

[0131] In some embodiments of RT-PCR assays, a TAQMAN® probe is used for quantitating nucleic acid. Such assays may use energy transfer (“ET”), such as fluorescence resonance energy transfer (“FRET”), to detect and quantitate the synthesized PCR product. Typically, the TAQMAN® probe comprises a fluorescent label (e.g., a fluorescent dye) coupled to one end (e.g., the 5′-end) and a quencher molecule is coupled to the other end (e.g., the 3′-end), such that the fluorescent label and the quencher are in close proximity, allowing the quencher to suppress the fluorescence signal of the dye via FRET. When a polymerase replicates the chimeric amplicon template to which the fluorescent labeled probe is bound, the 5′-nuclease of the polymerase cleaves the probe, decoupling the fluorescent label and the quencher so that label signal (such as fluorescence) is detected. Signal (such as fluorescence) increases with each PCR cycle proportionally to the amount of probe that is cleaved.

[0132] TAQMAN® probes typically comprise a region of contiguous nucleotides having a sequence that is identically present in or complementary to a region of a hypoxia biomarker polynucleotide such that the probe is specifically hybridizable to the resulting PCR amplicon. In some embodiments, the probe comprises a region of at least 6 contiguous nucleotides having a sequence that is fully complementary to or identically present in a region of a target hypoxia biomarker polynucleotide, such as comprising a region of at least 8 contiguous nucleotides, at least 10 contiguous nucleotides, at least 12 contiguous nucleotides, at least 14 contiguous nucleotides, or at least 16 contiguous nucleotides having a sequence that is complementary to or identically present in a region of a target hypoxia biomarker polynucleotide to be detected and/or quantitated.

[0133] In addition to the TAQMAN® assays, other real-time PCR chemistries useful for detecting PCR products in the methods presented herein include, but are not limited to, Molecular Beacons, Scorpion probes and intercalating dyes, such as SYBR Green, EvaGreen, thiazole orange, YO-PRO, TO-PRO, etc. For example, Molecular Beacons, like TAQMAN® probes, use FRET to detect and quantitate a PCR product via a probe having a fluorescent label (e.g., a fluorescent dye) and a quencher attached at the ends of the probe. Unlike TAQMAN® probes, however, Molecular Beacons remain intact during the PCR cycles. Molecular Beacon probes form a stem-loop structure when free in solution, thereby allowing the fluorescent label and quencher to be in close enough proximity to cause fluorescence quenching. When the Molecular Beacon hybridizes to a target, the stem-loop structure is abolished so that the fluorescent label and the quencher become separated in space and the fluorescent label fluoresces. Molecular Beacons are available, e.g., from Gene Link™ (see, genelink.com/newsite/products/mbintro.asp).

[0134] In some embodiments, Scorpion probes can be used as both sequence-specific primers and for PCR product detection and quantitation. Like Molecular Beacons, Scorpion probes form a stem-loop structure when not hybridized to a target nucleic acid. However, unlike Molecular Beacons, a Scorpion probe achieves both sequence-specific priming and PCR product detection. A fluorescent label (e.g., a fluorescent dye molecule) is attached to the 5′-end of the Scorpion probe, and a quencher is attached to the 3′-end. The 3′ portion of the probe is complementary to the extension product of the PCR primer, and this complementary portion is linked to the 5′-end of the probe by a non-amplifiable moiety. After the Scorpion primer is extended, the target-specific sequence of the probe binds to its complement within the extended amplicon, thus opening up the stem-loop structure and allowing the fluorescent label on the 5′-end to fluoresce and generate a signal. Scorpion probes are available from, e.g., Premier Biosoft International (see, www.premierbiosoft.com/tech_notes/Scorpion.html).

[0135] In some embodiments, labels that can be used on the FRET probes include colorimetric and fluorescent dyes such as Alexa Fluor dyes, BODIPY dyes, such as BODIPY FL; Cascade Blue; Cascade Yellow; coumarin and its derivatives, such as 7-amino-4-methylcoumarin, aminocoumarin and hydroxycoumarin; cyanine dyes, such as Cy3 and Cy5; eosins and erythrosins; fluorescein and its derivatives, such as fluorescein isothiocyanate; macrocyclic chelates of lanthanide ions, such as Quantum Dye™; Marina Blue; Oregon Green; rhodamine dyes, such as rhodamine red, tetramethylrhodamine and rhodamine 6G; Texas Red; fluorescent energy transfer dyes, such as thiazole orange-ethidium heterodimer; and, TOTAB.

[0136] Specific examples of dyes include, but are not limited to, those identified above and the following: Alexa Fluor 350, Alexa Fluor 405, Alexa Fluor 430, Alexa Fluor 488, Alexa Fluor 500. Alexa Fluor 514, Alexa Fluor 532, Alexa Fluor 546, Alexa Fluor 555, Alexa Fluor 568, Alexa Fluor 594, Alexa Fluor 610, Alexa Fluor 633, Alexa Fluor 647, Alexa Fluor 660, Alexa Fluor 680, Alexa Fluor 700, and, Alexa Fluor 750; amine-reactive BODIPY dyes, such as BODIPY 493/503, BODIPY 530/550, BODIPY 558/568, BODIPY 564/570, BODIPY 576/589, BODIPY 581/591, BODIPY 630/650, BODIPY 650/655, BODIPY FL, BODIPY R6G, BODIPY TMR, and, BODIPY-TR; Cy3, Cy5, 6-FAM, Fluorescein Isothiocyanate, HEX, 6-JOE, Oregon Green 488, Oregon Green 500, Oregon Green 514, Pacific Blue, REG, Rhodamine Green, Rhodamine Red, Renographin, ROX, SYPRO, TAMRA, 2′,4′,5′,7′-Tetrabromosulfonefluorescein, and TET.

[0137] Examples of dye/quencher pairs (i.e., donor/acceptor pairs) include, but are not limited to, fluorescein/tetramethylrhodamine; IAEDANS/fluorescein; EDANS/dabcyl; fluorescein/fluorescein; BODIPY FL/BODIPY FL; fluorescein/QSY 7 or QSY 9 dyes. When the donor and acceptor are the same, FRET may be detected, in some embodiments, by fluorescence depolarization. Certain specific examples of dye/quencher pairs (i.e., donor/acceptor pairs) include, but are not limited to, Alexa Fluor 350/Alexa Fluor488; Alexa Fluor 488/Alexa Fluor 546; Alexa Fluor 488/Alexa Fluor 555; Alexa Fluor 488/Alexa Fluor 568; Alexa Fluor 488/Alexa Fluor 594; Alexa Fluor 488/Alexa Fluor 647; Alexa Fluor 546/Alexa Fluor 568; Alexa Fluor 546/Alexa Fluor 594; Alexa Fluor 546/Alexa Fluor 647; Alexa Fluor 555/Alexa Fluor 594; Alexa Fluor 555/Alexa Fluor 647; Alexa Fluor 568/Alexa Fluor 647; Alexa Fluor 594/Alexa Fluor 647; Alexa Fluor 350/QSY35; Alexa Fluor 350/dabcyl; Alexa Fluor 488/QSY 35; Alexa Fluor 488/dabcyl; Alexa Fluor 488/QSY 7 or QSY 9; Alexa Fluor 555/QSY 7 or QSY9; Alexa Fluor 568/QSY 7 or QSY 9; Alexa Fluor 568/QSY 21; Alexa Fluor 594/QSY 21; and Alexa Fluor 647/QSY 21. In some embodiments, the same quencher may be used for multiple dyes, for example, a broad spectrum quencher, such as an Iowa Black® quencher (Integrated DNA Technologies, Coralville, Iowa) or a Black Hole Quencher™ (BHQ™; Sigma-Aldrich, St. Louis, Mo.).

[0138] In some embodiments, for example, in a multiplex reaction in which two or more moieties (such as amplicons) are detected simultaneously, each probe comprises a detectably different dye such that the dyes may be distinguished when detected simultaneously in the same reaction. One skilled in the art can select a set of detectably different dyes for use in a multiplex reaction. In some embodiments, multiple target hypoxia biomarker polynucleotides are detected and/or quantitated in a single multiplex reaction. In some embodiments, each probe that is targeted to a different hypoxia biomarker polynucleotide is spectrally distinguishable when released from the probe. Thus, each target hypoxia biomarker polynucleotide is detected by a unique fluorescence signal.

[0139] Specific examples of fluorescently labeled ribonucleotides useful in the preparation of real-time PCR probes for use in some embodiments of the methods described herein are available from Molecular Probes (Invitrogen), and these include, Alexa Fluor 488-5-UTP, Fluorescein-12-UTP, BODIPY FL-14-UTP, BODIPY TMR-14-UTP, Tetramethylrhodamine-6-UTP, Alexa Fluor 546-14-UTP, Texas Red-5-UTP, and BODIPY TR-14-UTP. Other fluorescent ribonucleotides are available from Amersham Biosciences (GE Healthcare), such as Cy3-UTP and Cy5-UTP.

[0140] Examples of fluorescently labeled deoxyribonucleotides useful in the preparation of real-time PCR probes for use in the methods described herein include Dinitrophenyl (DNP)-1′-dUTP, Cascade Blue-7-dUTP, Alexa Fluor 488-5-dUTP, Fluorescein-12-dUTP, Oregon Green 488-5-dUTP, BODIPY FL-14-dUTP, Rhodamine Green-5-dUTP, Alexa Fluor 532-5-dUTP, BODIPY TMR-14-dUTP, Tetramethylrhodamine-6-dUTP, Alexa Fluor 546-14-dUTP, Alexa Fluor 568-5-dUTP, Texas Red-12-dUTP, Texas Red-5-dUTP, BODIPY TR-14-dUTP, Alexa Fluor 594-5-dUTP, BODIPY 630/650-14-dUTP, BODIPY 650/665-14-dUTP; Alexa Fluor 488-7-OBEA-dCTP, Alexa Fluor 546-16-OBEA-dCTP, Alexa Fluor 594-7-OBEA-dCTP, Alexa Fluor 647-12-OBEA-dCTP. Fluorescently labeled nucleotides are commercially available and can be purchased from, e.g., Invitrogen.

[0141] In certain embodiments, target nucleic acids are quantified using blotting techniques, which are well known to those of skill in the art. Southern blotting involves the use of DNA as a target, whereas Northern blotting involves the use of RNA as a target. Each provides different types of information, although cDNA blotting is analogous, in many aspects, to blotting or RNA species. Briefly, a probe is used to target a DNA or RNA species that has been immobilized on a suitable matrix, often a filter of nitrocellulose. The different species should be spatially separated to facilitate analysis. This often is accomplished by gel electrophoresis of nucleic acid species followed by “blotting” on to the filter. Subsequently, the blotted target is incubated with a probe (usually labeled) under conditions that promote denaturation and rehybridization. Because the probe is designed to base pair with the target, the probe will bind a portion of the target sequence under renaturing conditions. Unbound probe is then removed, and detection is accomplished as described above. Following detection/quantification, one may compare the results seen in a given subject with a control reaction or a statistically significant reference group or population of control subjects as defined herein. In this way, it is possible to correlate the amount of hypoxia biomarker nucleic acid detected with the progression or severity of the disease.

[0142] Also contemplated are biochip-based technologies such as those described by Hacia et al. (1996, Nature Genetics 14: 441-447) and Shoemaker et al. (1996, Nature Genetics 14: 450-456). Briefly, these techniques involve quantitative methods for analyzing large numbers of genes rapidly and accurately. By tagging genes with oligonucleotides or using fixed nucleic acid probe arrays, one can employ biochip technology to segregate target molecules as high-density arrays and screen these molecules on the basis of hybridization. See also Pease et al. (1994, Proc. Natl. Acad. Sci. U.S.A. 91: 5022-5026); Fodor et al. (1991, Science 251: 767-773). Briefly, nucleic acid probes to hypoxia biomarker polynucleotides are made and attached to biochips to be used in screening and diagnostic methods, as outlined herein. The nucleic acid probes attached to the biochip are designed to be substantially complementary to specific expressed hypoxia biomarker nucleic acids, i.e., the target sequence (either the target sequence of the sample or to other probe sequences, for example in sandwich assays), such that hybridization of the target sequence and the probes of the present invention occur. This complementarity need not be perfect; there may be any number of base pair mismatches, which will interfere with hybridization between the target sequence and the nucleic acid probes of the present invention. However, if the number of mismatches is so great that no hybridization can occur under even the least stringent of hybridization conditions, the sequence is not a complementary target sequence. In certain embodiments, more than one probe per sequence is used, with either overlapping probes or probes to different sections of the target being used. That is, two, three, four or more probes, with three being desirable, are used to build in a redundancy for a particular target. The probes can be overlapping (i.e., have some sequence in common), or separate.

[0143] In an illustrative biochip analysis, oligonucleotide probes on the biochip are exposed to or contacted with a nucleic acid sample suspected of containing one or more hypoxia biomarker polynucleotides under conditions favoring specific hybridization. Sample extracts of DNA or RNA, either single or double-stranded, may be prepared from fluid suspensions of biological materials, or by grinding biological materials, or following a cell lysis step which includes, but is not limited to, lysis effected by treatment with SDS (or other detergents), osmotic shock, guanidinium isothiocyanate and lysozyme. Suitable DNA, which may be used in the method of the invention, includes cDNA. Such DNA may be prepared by any one of a number of commonly used protocols as for example described in Ausubel, et al., 1994, supra, and Sambrook, et al., 1989, supra.

[0144] Suitable RNA, which may be used in the method of the invention, includes messenger RNA, complementary RNA transcribed from DNA (cRNA) or genomic or subgenomic RNA. Such RNA may be prepared using standard protocols as for example described in the relevant sections of Ausubel, et al. 1994, supra and Sambrook, et al. 1989, supra).

[0145] cDNA may be fragmented, for example, by sonication or by treatment with restriction endonucleases. Suitably, cDNA is fragmented such that resultant DNA fragments are of a length greater than the length of the immobilized oligonucleotide probe(s) but small enough to allow rapid access thereto under suitable hybridization conditions. Alternatively, fragments of cDNA may be selected and amplified using a suitable nucleotide amplification technique, as described for example above, involving appropriate random or specific primers.

[0146] Usually the target hypoxia biomarker polynucleotides are detectably labeled so that their hybridization to individual probes can be determined. The target polynucleotides are typically detectably labeled with a reporter molecule illustrative examples of which include chromogens, catalysts, enzymes, fluorochromes, chemiluminescent molecules, bioluminescent molecules, lanthanide ions (e.g., Eu³⁴), a radioisotope and a direct visual label. In the case of a direct visual label, use may be made of a colloidal metallic or non-metallic particle, a dye particle, an enzyme or a substrate, an organic polymer, a latex particle, a liposome, or other vesicle containing a signal producing substance and the like. Illustrative labels of this type include large colloids, for example, metal colloids such as those from gold, selenium, silver, tin and titanium oxide. In some embodiments in which an enzyme is used as a direct visual label, biotinylated bases are incorporated into a target polynucleotide.

[0147] The hybrid-forming step can be performed under suitable conditions for hybridizing oligonucleotide probes to test nucleic acid including DNA or RNA. In this regard, reference may be made, for example, to NUCLEIC ACID HYBRIDIZATION, A PRACTICAL APPROACH (Homes and Higgins, eds.) (IRL press, Washington D.C., 1985). In general, whether hybridization takes place is influenced by the length of the oligonucleotide probe and the polynucleotide sequence under test, the pH, the temperature, the concentration of mono- and divalent cations, the proportion of G and C nucleotides in the hybrid-forming region, the viscosity of the medium and the possible presence of denaturants. Such variables also influence the time required for hybridization. The preferred conditions will therefore depend upon the particular application. Such empirical conditions, however, can be routinely determined without undue experimentation.

[0148] After the hybrid-forming step, the probes are washed to remove any unbound nucleic acid with a hybridization buffer. This washing step leaves only bound target polynucleotides. The probes are then examined to identify which probes have hybridized to a target polynucleotide.

[0149] The hybridization reactions are then detected to determine which of the probes has hybridized to a corresponding target sequence. Depending on the nature of the reporter molecule associated with a target polynucleotide, a signal may be instrumentally detected by irradiating a fluorescent label with light and detecting fluorescence in a fluorimeter; by providing for an enzyme system to produce a dye which could be detected using a spectrophotometer; or detection of a dye particle or a colored colloidal metallic or non-metallic particle using a reflectometer; in the case of using a radioactive label or chemiluminescent molecule employing a radiation counter or autoradiography. Accordingly, a detection means may be adapted to detect or scan light associated with the label which light may include fluorescent, luminescent, focused beam or laser light. In such a case, a charge couple device (CCD) or a photocell can be used to scan for emission of light from a probe:target polynucleotide hybrid from each location in the micro-array and record the data directly in a digital computer. In some cases, electronic detection of the signal may not be necessary. For example, with enzymatically generated color spots associated with nucleic acid array format, visual examination of the array will allow interpretation of the pattern on the array. In the case of a nucleic acid array, the detection means is suitably interfaced with pattern recognition software to convert the pattern of signals from the array into a plain language genetic profile. In certain embodiments, oligonucleotide probes specific for different hypoxia biomarker polynucleotides are in the form of a nucleic acid array and detection of a signal generated from a reporter molecule on the array is performed using a “chip reader”. A detection system that can be used by a “chip reader” is described for example by Pirrung et al. (U.S. Pat. No. 5,143,854). The chip reader will typically also incorporate some signal processing to determine whether the signal at a particular array position or feature is a true positive or maybe a spurious signal. Exemplary chip readers are described for example by Fodor et al. (U.S. Pat. No. 5,925,525). Alternatively, when the array is made using a mixture of individually addressable kinds of labeled microbeads, the reaction may be detected using flow cytometry.

[0150] In certain embodiments, the hypoxia biomarker is a target RNA (e.g., mRNA) or a DNA copy of the target RNA whose level or abundance is measured using at least one nucleic acid probe that hybridizes under at least low, medium, or high stringency conditions to the target RNA or to the DNA copy, wherein the nucleic acid probe comprises at least 15 (e.g., 15, 16, 17, 18, 19, 20, 21, 22, 23, 24, 25, 26, 27, 28, 29, 30, or more) contiguous nucleotides of hypoxia biomarker polynucleotide. In some embodiments, the measured level or abundance of the target RNA or its DNA copy is normalized to the level or abundance of a reference RNA or a DNA copy of the reference RNA. Suitably, the nucleic acid probe is immobilized on a solid or semi-solid support. In illustrative examples of this type, the nucleic acid probe forms part of a spatial array of nucleic acid probes. In some embodiments, the level of nucleic acid probe that is bound to the target RNA or to the DNA copy is measured by hybridization (e.g., using a nucleic acid array). In other embodiments, the level of nucleic acid probe that is bound to the target RNA or to the DNA copy is measured by nucleic acid amplification (e.g., using a polymerase chain reaction (PCR)). In still other embodiments, the level of nucleic acid probe that is bound to the target RNA or to the DNA copy is measured by nuclease protection assay.

[0151] Sequencing technologies such as Sanger sequencing, pyrosequencing, sequencing by ligation, massively parallel sequencing, also called “Next-generation sequencing” (NGS), and other high-throughput sequencing approaches with or without sequence amplification of the target can also be used to detect or quantify the presence of hypoxia nucleic acid biomarker in a sample. Sequence-based methods can provide further information regarding alternative splicing and sequence variation in previously identified genes. Sequencing technologies include a number of steps that are grouped broadly as template preparation, sequencing, detection and data analysis. Current methods for template preparation involve randomly breaking genomic DNA into smaller sizes from which each fragment is immobilized to a support. The immobilization of spatially separated fragment allows thousands to billions of sequencing reaction to be performed simultaneously. A sequencing step may use any of a variety of methods that are commonly known in the art. One specific example of a sequencing step uses the addition of nucleotides to the complementary strand to provide the DNA sequence. The detection steps range from measuring bioluminescent signal of a synthesized fragment to four-color imaging of single molecule. In some embodiments in which NGS is used to detect or quantify the presence of a hypoxia nucleic acid biomarker in a sample, the methods are suitably selected from semiconductor sequencing (Ion Torrent; Personal Genome Machine); Helicos True Single Molecule Sequencing (tSMS) (Harris et al. 2008, Science 320:106-109); 454 sequencing (Roche) (Margulies et al. 2005, Nature, 437, 376-380); SOLiD technology (Applied Biosystems); SOLEXA sequencing (Illumina); single molecule, real-time (SMRT™) technology of Pacific Biosciences; nanopore sequencing (Soni and Meller, 2007. Clin Chem 53: 1996-2001); DNA nanoball sequencing; sequencing using technology from Dover Systems (Polonator), and technologies that do not require amplification or otherwise transform native DNA prior to sequencing (e.g., Pacific Biosciences and Helicos), such as nanopore-based strategies (e.g., Oxford Nanopore, Genia Technologies, and Nabsys).

[0152] 2.3 Quantification or Detection of Protein Biomarkers

[0153] In other embodiments, hypoxia biomarker protein levels are assayed using protein-based assays known in the art. For example, when the hypoxia biomarker protein is an enzyme, the protein can be quantified based upon its catalytic activity or based upon the number of molecules of the protein contained in a sample. Antibody-based techniques may be employed including, for example, immunoassays, such as the enzyme-linked immunosorbent assay (ELISA) and the radioimmunoassay (RIA). For example, the anti-G9A antibody ab133482 (abcam) could be used to measure the group 2 hypoxia biomarker G9a.

[0154] In specific embodiments, protein-capture arrays that permit simultaneous detection and/or quantification of a large number of proteins are employed. For example, low-density protein arrays on filter membranes, such as the universal protein array system (Ge, 2000 Nucleic Acids Res. 28(2): e3) allow imaging of arrayed antigens using standard ELISA techniques and a scanning charge-coupled device (CCD) detector. Immuno-sensor arrays have also been developed that enable the simultaneous detection of clinical analytes. It is now possible using protein arrays, to profile protein expression in bodily fluids, such as in sera of healthy or diseased subjects, as well as in subjects pre- and post-drug treatment.

[0155] Exemplary protein capture arrays include arrays comprising spatially addressed antigen-binding molecules, commonly referred to as antibody arrays, which can facilitate extensive parallel analysis of numerous proteins defining a proteome or subproteome. Antibody arrays have been shown to have the required properties of specificity and acceptable background, and some are available commercially (e.g., BD Biosciences, Clontech, Bio-Rad and Sigma). Various methods for the preparation of antibody arrays have been reported (see, e.g., Lopez et al., 2003 J. Chromatogram. B 787:19-27; Cahill, 2000 Trends in Biotechnology 7:47-51; U.S. Pat. App. Pub. 2002/0055186; U.S. Pat. App. Pub. 2003/0003599; PCT publication WO 03/062444; PCT publication WO 03/077851; PCT publication WO 02/59601; PCT publication WO 02/39120; PCT publication WO 01/79849; PCT publication WO 99/39210). The antigen-binding molecules of such arrays may recognize at least a subset of proteins expressed by a cell or population of cells, illustrative examples of which include growth factor receptors, hormone receptors, neurotransmitter receptors, catecholamine receptors, amino acid derivative receptors, cytokine receptors, extracellular matrix receptors, antibodies, lectins, cytokines, serpins, proteases, kinases, phosphatases, ras-like GTPases, hydrolases, steroid hormone receptors, transcription factors, heat-shock transcription factors, DNA-binding proteins, zinc-finger proteins, leucine-zipper proteins, homeodomain proteins, intracellular signal transduction modulators and effectors, apoptosis-related factors, DNA synthesis factors, DNA repair factors, DNA recombination factors and cell-surface antigens.

[0156] Individual spatially distinct protein-capture agents are typically attached to a support surface, which is generally planar or contoured. Common physical supports include glass slides, silicon, microwells, nitrocellulose or PVDF membranes, and magnetic and other microbeads.

[0157] Particles in suspension can also be used as the basis of arrays, providing they are coded for identification; systems include color coding for microbeads (e.g., available from Luminex, Bio-Rad and Nanomics Biosystems) and semiconductor nanocrystals (e.g., QDOTS™, available from Quantum Dots), and barcoding for beads (ULTRAPLEX™, available from Smartbeads) and multimetal microrods (NANOBARCODES™ particles, available from Surromed). Beads can also be assembled into planar arrays on semiconductor chips (e.g., available from LEAPS technology and BioArray Solutions). Where particles are used, individual protein-capture agents are typically attached to an individual particle to provide the spatial definition or separation of the array. The particles may then be assayed separately, but in parallel, in a compartmentalized way, for example in the wells of a microtiter plate or in separate test tubes.

[0158] In operation, a protein sample, which is optionally fragmented to form peptide fragments (see, e.g., U.S. Pat. App. Pub. 2002/0055186), is delivered to a protein-capture array under conditions suitable for protein or peptide binding, and the array is washed to remove unbound or non-specifically bound components of the sample from the array. Next, the presence or amount of protein or peptide bound to each feature of the array is detected using a suitable detection system. The amount of protein bound to a feature of the array may be determined relative to the amount of a second protein bound to a second feature of the array. In certain embodiments, the amount of the second protein in the sample is already known or known to be invariant.

[0159] In specific embodiments, the hypoxia biomarker is a target polypeptide whose level is measured using at least one antigen-binding molecule that is immuno-interactive with the target polypeptide. In these embodiments, the measured level of the target polypeptide is normalized to the level of a reference polypeptide. Suitably, the antigen-binding molecule is immobilized on a solid or semi-solid support. In illustrative examples of this type, the antigen-binding molecule forms part of a spatial array of antigen-binding molecule. In some embodiments, the level of antigen-binding molecule that is bound to the target polypeptide is measured by immunoassay (e.g., using an ELISA).

[0160] 2.4 Diseases and Conditions Associated with Hypoxia

[0161] The methods described above and elsewhere herein are suitable for determining the likelihood of any disease or condition that is known to occur in hypoxic environments. By way of a non-limiting example, the suitable diseases or conditions include cancer, ischemic stroke, arthritis (e.g., rheumatoid arthritis), inflammation, cartilage erosion, abnormal energy metabolism, oxidative damage, etc.

[0162] In some embodiments, the hypoxic condition is diagnosed in a cancer or tumor.

[0163] In certain embodiments of this type, the cancer is a solid tumor. In some embodiments of this type, the cancer is a blood tumor (i.e., not a solid tumor). The type of cancer includes, but is not limited to, one or more of the cancer types such as primary cancer, metastatic cancer, breast cancer, colon cancer, rectal cancer, lung cancer, oropharyngeal cancer, hypopharyngeal cancer, oesophageal cancer, stomach cancer, pancreatic cancer, liver cancer, gallbladder cancer, bile duct cancer, small intestine cancer, urinary tract cancer, kidney cancer, bladder cancer, urothelium cancer, female genital tract cancer, cervical cancer, uterine cancer, ovarian cancer, choriocarcinoma, gestational trophoblastic disease, male genital tract cancer, prostate cancer, seminal vesicle cancer, testicular cancer, germ cell tumors, endocrine gland tumors, thyroid cancer, adrenal cancer, pituitary gland cancer, skin cancer, hemangiomas, melanomas, sarcomas arising from bone and soft tissues, Kaposi's sarcoma, brain cancer, nerve cancer, ocular cancer, meningeal cancer, astrocytoma, glioma, glioblastoma, retinoblastoma, neuroma, neuroblastoma, Schwannoma, meningioma, solid tumors arising from hematopoietic malignancies, leukaemia, Hodgkin's lymphoma, non-Hodgkin's lymphoma, Burkitt's lymphoma, metastatic melanoma, recurrent or persistent ovarian epithelial cancer, fallopian tube cancer, primary peritoneal cancer, epithelial ovarian cancer, primary peritoneal serous cancer, non-small cell lung cancer, gastrointestinal stromal tumors, colorectal cancer, small cell lung cancer, melanoma, glioblastoma multiforme, non-squamous non-small-cell lung cancer, malignant glioma, primary peritoneal serous cancer, metastatic liver cancer, neuroendocrine carcinoma, refractory malignancy, triple negative breast cancer, HER2 amplified breast cancer, squamous cell carcinoma, nasopharageal cancer, oral cancer, biliary tract, hepatocellular carcinoma, squamous cell carcinomas of the head and neck (SCCHN), non-medullary thyroid carcinoma, neurofibromatosis type 1, CNS cancer, liposarcoma, leiomyosarcoma, salivary gland cancer, mucosal melanoma, acral/lentiginous melanoma, paraganglioma; pheochromocytoma, advanced metastatic cancer, solid tumor, squamous cell carcinoma, sarcoma, melanoma, endometrial cancer, head and neck cancer, rhabdomysarcoma, multiple myeloma, gastrointestinal stromal tumor, mantle cell lymphoma, gliosarcoma, bone sarcoma, refractory malignancy, advanced metastatic cancer, solid tumor, metastatic melanoma, prostate cancer, solid tumors, recurrent or persistent ovarian epithelial cancer, fallopian tube cancer, lung cancer, and primary peritoneal cancer.

[0164] 2.5 Diseases and Conditions Associated with Aberrant G9a Expression

[0165] The biomarkers disclosed above and elsewhere herein also have utility for determining the likelihood of the presence or absence of a G9a-associated disease or condition in a subject. Although aberrant G9a expression is shown herein to be indicative of a hypoxic condition, other conditions that occurring in normoxic environments that have increased G9a polypeptide relative to a healthy condition are considered to be suitable for diagnosing with the biomarkers disclosed above and elsewhere herein.

[0166] For example, diseases and conditions that are associated with aberrant G9a expression include choline deficiency disease and borderline glaucoma.

[0167] Accordingly, the present invention also provides methods for determining an indicator used in assessing a likelihood of the presence or absence of a G9a-associated disease or condition in a subject, the method comprising, consisting or consisting essentially of: (1) determining a biomarker value that is measured or derived for at least one G9a-associated biomarker (e.g., 1, 2, 3, 4, 5, 6, 7, 8, 9 or 10 G9a-associated biomarkers) in a sample obtained from the subject, wherein the at least one G9a-associated biomarker is selected from ARNTL, CD1C, HHEX, KLRG1, MMP16, FGFR2, GATA2, CEACAM7, OGN, and AGTR1; and (2) determining the indicator using the biomarker value(s), wherein the indicator is at least partially indicative of the likelihood of the presence or absence of the G9a-associated condition in the subject.

[0168] 2.6 Kits

[0169] All the essential reagents required for detecting and quantifying the hypoxia biomarkers of the invention may be assembled together in a kit. In some embodiments, the kit comprises a reagent that permits quantification of at least one hypoxia biomarker. In some embodiments the kit comprises: (i) a reagent that allows quantification (e.g., determining the level or abundance) of at least one hypoxia biomarker. In some embodiments, the kit further comprises (ii) a reagent that allows quantification (e.g., determining the level or abundance) of a second hypoxia biomarker, wherein the second hypoxia biomarker is G9a.

[0170] In the context of the present invention, “kit” is understood to mean a product containing the different reagents necessary for carrying out the methods of the invention packed so as to allow their transport and storage. Materials suitable for packing the components of the kit include crystal, plastic (polyethylene, polypropylene, polycarbonate and the like), bottles, vials, paper, envelopes and the like. Additionally, the kits of the invention can contain instructions for the simultaneous, sequential or separate use of the different components contained in the kit. The instructions can be in the form of printed material or in the form of an electronic support capable of storing instructions such that they can be read by a subject, such as electronic storage media (magnetic disks, tapes and the like), optical media (CD-ROM, DVD) and the like. Alternatively, or in addition, the media can contain internet addresses that provide the instructions.

[0171] Reagents that allow quantification of a hypoxia biomarker include compounds or materials, or sets of compounds or materials, which allow quantification of the hypoxia biomarker. In specific embodiments, the compounds, materials or sets of compounds or materials permit determining the expression level of a gene (e.g., hypoxia biomarker gene), including without limitation the extraction of RNA material, the determination of the level of a corresponding RNA, etc., primers for the synthesis of a corresponding cDNA, primers for amplification of DNA, and/or probes capable of specifically hybridizing with the RNAs (or the corresponding cDNAs) encoded by the genes, TaqMan probes, etc.

[0172] The kits may also optionally include appropriate reagents for detection of labels, positive and negative controls, washing solutions, blotting membranes, microtiter plates, dilution buffers and the like. For example, a nucleic acid-based detection kit may include (i) a hypoxia biomarker polynucleotide (which may be used as a positive control); and (ii) a primer or probe that specifically hybridizes to a hypoxia biomarker polynucleotide. Also included may be enzymes suitable for amplifying nucleic acids including various polymerases (reverse transcriptase, Taq, SEQUENASE™, DNA ligase etc. depending on the nucleic acid amplification technique employed), deoxynucleotides and buffers to provide the necessary reaction mixture for amplification. Such kits also generally will comprise, in suitable means, distinct containers for each individual reagent and enzyme as well as for each primer or probe. Alternatively, a protein-based detection kit may include (i) a hypoxia biomarker polypeptide (which may be used as a positive control); and (ii) an antibody that binds specifically to a hypoxia biomarker polypeptide. The kit can also feature various devices (e.g., one or more) and reagents (e.g., one or more) for performing one of the assays described herein; and/or printed instructions for using the kit to quantify the expression of a hypoxia biomarker gene.

[0173] The reagents described herein, which may be optionally associated with detectable labels, can be presented in the format of a microfluidics card, a chip or chamber, a microarray or a kit adapted for use with the assays described in the examples or below, e.g., RT-PCR or Q PCR techniques described herein.

[0174] The reagents also have utility in compositions for detecting and quantifying the biomarkers of the invention. For example, a reverse transcriptase may be used to reverse transcribe RNA transcripts, including mRNA, in a nucleic acid sample, to produce reverse transcribed transcripts, including reverse transcribed mRNA (also referred to as “cDNA”). In specific embodiments, the reverse transcribed mRNA is whole cell reverse transcribed mRNA (also referred to herein as “whole cell cDNA”). The nucleic acid sample is suitably derived from components of the immune system, representative examples of which include components of the innate and adaptive immune systems as broadly discussed for example above. In specific embodiments, the reverse transcribed RNA is derived blood cells (e.g., peripheral blood cells). Suitably, the reverse transcribed RNA is derived leukocytes.

[0175] The reagents are suitably used to quantify the reverse transcribed transcripts. For example, oligonucleotide primers that hybridize to the reverse transcribed transcript can be used to amplify at least a portion of the reverse transcribed transcript via a suitable nucleic acid amplification technique, e.g., RT-PCR or qPCR techniques described herein. Alternatively, oligonucleotide probes may be used to hybridize to the reverse transcribed transcript for the quantification, using a nucleic acid hybridization analysis technique (e.g., microarray analysis), as described for example above. Thus, in some embodiments, a respective oligonucleotide primer or probe is hybridized to a complementary nucleic acid sequence of a reverse transcribed transcript in the compositions of the invention. The compositions typically comprise labeled reagents for detecting and/or quantifying the reverse transcribed transcripts. Representative reagents of this type include labeled oligonucleotide primers or probes that hybridize to RNA transcripts or reverse transcribed RNA, labeled RNA, labeled reverse transcribed RNA as well as labeled oligonucleotide linkers or tags (e.g., a labeled RNA or DNA linker or tag) for labeling (e.g., end labeling such as 3′ end labeling) RNA or reverse transcribed RNA. The primers, probes, RNA or reverse transcribed RNA (i.e., cDNA) (whether labeled or non-labeled) may be immobilized or free in solution. Representative reagents of this type include labeled oligonucleotide primers or probes that hybridize to reverse transcribed and transcripts as well as labeled reverse transcribed transcripts. The label can be any reporter molecule as known in the art, illustrative examples of which are described above and elsewhere herein.

[0176] The present invention also encompasses non-reverse transcribed RNA embodiments in which cDNA is not made and the RNA transcripts are directly the subject of the analysis. Thus, in other embodiments, reagents are suitably used to quantify RNA transcripts directly. For example, oligonucleotide probes can be used to hybridize to transcripts for quantification of hypoxia biomarkers of the invention, using a nucleic acid hybridization analysis technique (e.g., microarray analysis), as described for example above. Thus, in some embodiments, a respective oligonucleotide probe is hybridized to a complementary nucleic acid sequence of a hypoxia biomarker transcript in the compositions of the invention. In illustrative examples of this type, the compositions may comprise labeled reagents that hybridize to transcripts for detecting and/or quantifying the transcripts. Representative reagents of this type include labeled oligonucleotide probes that hybridize to transcripts as well as labeled transcripts. The primers or probes may be immobilized or free in solution.

[0177] 2.7 Methods of Managing Therapy

[0178] The present invention also extends to the management of a disease or condition that is associated with hypoxia (e.g., a hypoxic cancer), or prevention of further progression of the disease or condition, or assessment of the efficacy of therapies in subjects following positive diagnosis for the presence of a hypoxic condition, in a subject. Once a subject is positively identified as having a hypoxic condition, the subject may be administered a therapeutic agent for treating the hypoxic condition such as a G9a antagonist, illustrative examples of which are described in the International PCT Patent Publication No. WO2015/200329 and U.S. Patent Publication No. 2015/0274660, which are incorporated herein by reference in their entirety.

[0179] Other examples of G9a antagonists that may be suitable for use with the present invention include chaetocin, BIX-01294, UNC0224, UNC0638, UNC0642, UNC0646, and A-366.

[0180] Typically, the therapeutic agents will be administered in pharmaceutical (or veterinary) compositions together with a pharmaceutically acceptable carrier and in an effective amount to achieve their intended purpose. The dose of active compounds administered to a subject should be sufficient to achieve a beneficial response in the subject over time such as a reduction in, or relief from, hypoxia. The quantity of the pharmaceutically active compounds(s) to be administered may depend on the subject to be treated inclusive of the age, sex, weight and general health condition thereof. In this regard, precise amounts of the active compound(s) for administration will depend on the judgment of the practitioner. In determining the effective amount of the active compound(s) to be administered in the treatment or prevention of a hypoxic condition, the medical practitioner or veterinarian may evaluate severity of any symptom or clinical sign associated with the presence of the hypoxic. In any event, those of skill in the art may readily determine suitable dosages of the therapeutic agents and suitable treatment regimens without undue experimentation.

[0181] The therapeutic agents may be administered in concert with adjunctive (palliative) therapies to increase oxygen supply to major organs, increase blood flow to major organs and/or to reduce the inflammatory response. Illustrative examples of such adjunctive therapies include non-steroidal-anti-inflammatory drugs (NSAIDs), intravenous saline and oxygen.

[0182] The present invention also contemplates the use of the indicator-determining methods, apparatus, compositions and kits disclosed herein in methods of treating, preventing or inhibiting the development of a hypoxic condition (e.g., a hypoxic cancer) in a subject. These methods (also referred to herein as “treatment methods”) generally comprise: exposing the subject to a treatment regimen for treating a hypoxic condition, or avoiding exposing the subject to a treatment regimen for treating a disease or condition that is not associated with hypoxia, based on an indicator obtained from an indicator-determining method as disclosed herein. In specific embodiments, the treatment methods comprise: (a) determining a plurality of biomarker values for at least one (e.g., 1, 2, 3, 4, 5, 6, 7, 8, 9, 10, or more) hypoxia biomarkers of the subject, each biomarker value being indicative of a value measured or derived for a respective hypoxia biomarker; (b) determining an indicator using a combination of the plurality of biomarker values, the indicator being at least partially indicative of the presence or absence of a hypoxic condition (e.g., a hypoxic cancer), wherein: (i) at least one (e.g., 1, 2, 3, 4, 5, 6, 7, 8, 9, 10, or more) hypoxia biomarkers; and (ii) the indicator has a performance value greater than or equal to a performance threshold representing the ability of the indicator to diagnose the presence or absence of hypoxia; and (c) administering to the subject, on the basis that the indicator indicates the presence of a hypoxic condition, an effective amount of an agent that treats or ameliorates the symptoms or reverses or inhibits the development of the hypoxic condition.

[0183] In advantageous embodiments, the treatment methods comprise: (1) determining a plurality of measured biomarker values, each measured biomarker value being a measured value of an individual hypoxia biomarker of the subject; and (2) applying a function to at least two of the measured biomarker values to determine at least one derived biomarker value, the at least one derived biomarker value being indicative of a value of a corresponding derived hypoxia biomarker. The function suitably includes at least one of: (a) multiplying two biomarker values; (b) dividing two biomarker values; (c) adding two biomarker values; (d) subtracting two biomarker values; (e) a weighted sum of at least two biomarker values; (f) a log sum of at least two biomarker values; (g) a geometric mean of at least two biomarker values; and (h) a sigmoidal function of at least two biomarker values.

[0184] The present invention can be practiced in the field of predictive medicine for the purpose of diagnosis or monitoring the presence or development of hypoxic condition in a subject, and/or monitoring response to therapy efficacy. The biomarker profiles and corresponding indicators of the present invention further enable determination of endpoints in pharmacotranslational studies. For example, clinical trials can take many months or even years to establish the pharmacological parameters for a medicament to be used in treating or preventing a hypoxic condition (e.g., hypoxic cancer). However, these parameters may be associated with a biomarker profile and corresponding indicator of a health state (e.g., a healthy condition). Hence, the clinical trial can be expedited by selecting a treatment regimen (e.g., medicament and pharmaceutical parameters), which results in a biomarker profile associated with a desired health state (e.g., healthy condition). This may be determined for example by: (1) determining biomarker values that are measured or derived for at least two (e.g., 2, 3, 4, 5, 6, 7, 8, 9, 10, or more) corresponding hypoxia biomarker of a subject after treatment with a treatment regimen; (2) determining the indicator using the biomarker values; and (3) determining that the treatment regimen is effective for changing the health status of the subject to the desired health state (e.g., healthy condition) on the basis that the indicator indicates the presence of a healthy condition or the presence of a condition of a lower degree relative to the degree of the condition in the subject before treatment with the treatment regimen. As used herein, the term “degree” refers to the extent or stage of a condition. Alternatively, selection of the treatment regimen may be determined by: (a) determining a plurality of biomarker values for at least two (e.g., 2, 3, 4, 5, 6, 7, 8, 9, 10, or more) hypoxia biomarkers of a subject after treatment with a treatment regimen, each biomarker value being indicative of a value measured or derived for a respective hypoxia biomarker; (b) determining an indicator using a combination of the plurality of hypoxia biomarker values, the indicator being at least partially indicative of the presence or absence of a hypoxic condition, wherein: (i) at least two (e.g., 2, 3, 4, 5, 6, 7, 8, 9, 10, or more) hypoxic biomarkers have a mutual correlation in respect of the at least one condition that lies within a mutual correlation range, the mutual correlation range being between ±0.9; and (ii) the indicator has a performance value greater than or equal to a performance threshold representing the ability of the indicator to diagnose the presence or absence of the hypoxic condition, or to provide a prognosis for the at least one condition, the performance threshold being indicative of an explained variance of at least 0.3, and (c) determining that the treatment regimen is effective for changing the status of the subject to the desired state (e.g., normoxia) on the basis that the indicator indicates the presence of a normoxia or the presence of a hypoxia of a lower degree relative to the degree of hypoxia in the subject before treatment with the treatment regimen. Accordingly, this aspect of the present invention advantageously provides methods of monitoring the efficacy of a particular treatment regimen in a subject (for example, in the context of a clinical trial) already diagnosed with a hypoxic condition. These methods take advantage of measured or derived biomarker values that correlate with treatment efficacy to determine, for example, whether measured or derived biomarker values of a subject undergoing treatment partially or completely normalize during the course of or following therapy or otherwise shows changes associated with responsiveness to the therapy.

[0185] Accordingly, the invention provides methods of correlating a biomarker profile with an effective treatment regimen for a hypoxic condition. In some embodiments, these methods comprise: (1) determining a biomarker profile defining biomarker values that are measured or derived for at least one (e.g., 1, 2, 3, 4, 5, 6, 7, 8, 9, 10, or more) corresponding hypoxia biomarkers of a subject with hypoxia and for whom an effective treatment has been identified; and (2) correlating the biomarker profile so determined with an effective treatment regimen for a hypoxic condition (e.g., a G9a antagonist). In some embodiments, these methods comprise: (a) determining a biomarker profile defining a combination of at least two (e.g., 2, 3, 4, 5, 6, 7, 8, 9, 10, or more) biomarker values corresponding to values of at least two hypoxia biomarkers that can be measured or derived for a subject with hypoxia and for whom an effective treatment has been identified, wherein: (i) the at least two hypoxia biomarkers have a mutual correlation in respect of the condition that lies within a mutual correlation range, the mutual correlation range being between ±0.9; and (ii) the combination of at least two biomarker values has a performance value greater than or equal to a performance threshold representing the ability of the combination of at least two biomarker values to diagnose the presence or absence of a hypoxic condition, or to provide a prognosis for a disease or condition that is associated with hypoxia, the performance threshold being indicative of an explained variance of at least 0.3; and (b) correlating the biomarker profile so determined with an effective treatment regimen for a hypoxic condition (e.g., a G9a antagonist). In specific embodiments, an indicator or biomarker profile is correlated to a global probability or a particular outcome, using ROC curves.

[0186] The invention further provides methods for determining whether a treatment regimen is effective for treating a subject with a hypoxic condition (e.g., hypoxic cancer). In some embodiments, these methods comprise: (1) determining post-treatment biomarker values that are measured or derived for at least two (e.g., 2, 3, 4, 5, 6, 7, 8, 9, 10, or more) corresponding hypoxia biomarkers of a subject after treatment with a treatment regimen; (2) determining a post-treatment indicator using the post-treatment biomarker values, wherein the post-treatment indicator is at least partially indicative of the presence or absence of a hypoxic condition, wherein the post-treatment indicator indicates whether the treatment regimen is effective for treating the hypoxic condition in the subject on the basis that post-treatment indicator indicates the presence of a healthy condition or the presence of hypoxia of a lower degree relative to the degree of hypoxia in the subject before treatment with the treatment regimen. In other embodiments, these methods comprise: (a) determining a plurality of post-treatment biomarker values, each post-treatment hypoxia biomarker value being indicative of a value measured or derived for at least one (e.g., 1, 2, 3, 4, 5, 6, 7, 8, 9, 10, or more) hypoxia biomarker of a subject after treatment with the treatment regimen; (b) determining a post-treatment indicator using a combination of the plurality of post-treatment biomarker values, the post-treatment indicator being at least partially indicative of the presence or absence of a hypoxic condition, wherein: (i) at least two (e.g., 2, 3, 4, 5, 6, 7, 8, 9, 10, or more) hypoxia biomarkers have a mutual correlation in respect of the at least one condition that lies within a mutual correlation range, the mutual correlation range being between ±0.9; and (ii) the post-treatment indicator has a performance value greater than or equal to a performance threshold representing the ability of the post-treatment indicator to diagnose the presence or absence of a hypoxic condition, the performance threshold being indicative of an explained variance of at least 0.3, wherein the post-treatment indicator indicates whether the treatment regimen is effective for treating the hypoxic condition in the subject on the basis that post-treatment indicator indicates the presence of a healthy condition (i.e, normoxia) or the presence of a hypoxic condition of a lower degree relative to the degree of hypoxia in the subject before treatment with the treatment regimen.

[0187] The invention can also be practiced to evaluate whether a subject is responding (i.e., a positive response) or not responding (i.e., a negative response) to a treatment regimen. This aspect of the invention provides methods of correlating a biomarker profile with a positive or negative response to a treatment regimen. In some embodiments, these methods comprise: (1) determining a biomarker profile defining biomarker values that are measured or derived for at least two (e.g., 2, 3, 4, 5, 6, 7, 8, 9, 10, or more) corresponding hypoxia biomarkers of a subject following commencement of the treatment regimen; and (2) correlating the biomarker profile so determined with a positive or negative response to the treatment regimen. In other embodiments, these methods comprise: (a) determining a biomarker profile defining a combination of at least two (e.g., 2, 3, 4, 5, 6, 7, 8, 9, 10, or more) biomarker values corresponding to values of at least two hypoxia biomarkers that can be measured or derived for a subject following commencement of the treatment regimen, wherein: (i) the at least two hypoxia biomarkers have a mutual correlation in respect of hypoxia, which lies within a mutual correlation range, the mutual correlation range being between ±0.9; and (ii) the combination of at least two biomarker values has a performance value greater than or equal to a performance threshold representing the ability of the combination of at least two biomarker values to diagnose the presence or absence of a hypoxic condition, or to provide a prognosis for disease or condition that is associated with the hypoxic condition, the performance threshold being indicative of an explained variance of at least 0.3; and (b) correlating the biomarker profile so determined with a positive or negative response to the treatment regimen.

[0188] The invention also encompasses methods of determining a positive or negative response to a treatment regimen by a subject with a hypoxic condition. In some embodiments, these methods comprise: (1) correlating a reference biomarker profile with a positive or negative response to the treatment regimen, wherein the biomarker profile defines biomarker values that are measured or derived for at least two (e.g., 2, 3, 4, 5, 6, 7, 8, 9, 10, or more) corresponding hypoxic biomarkers of a control subject or control group; (2) determining a sample biomarker profile defining biomarker values that are measured or derived for the at least two (e.g., 2, 3, 4, 5, 6, 7, 8, 9, 10, or more) corresponding hypoxic biomarker of the subject following commencement of the treatment regimen, wherein the sample biomarker profile indicates whether the subject is responding positively or negatively to the treatment regimen, based on the correlation of the reference biomarker signature with the positive or negative response to the treatment regimen. In other embodiments, the methods comprise: (a) correlating a reference biomarker profile with a positive or negative response to the treatment regimen, wherein the biomarker profile defines a combination of at least two (e.g., 2, 3, 4, 5, 6, 7, 8, 9, 10, or more) biomarker values corresponding to values of at least two hypoxia biomarkers that are measured for or derived from a control subject or control group, wherein: (i) the at least two hypoxia biomarkers have a mutual correlation in respect of hypoxia, which lies within a mutual correlation range, the mutual correlation range being between ±0.9; and (ii) the combination of at least two biomarker values has a performance value greater than or equal to a performance threshold representing the ability of the combination of at least two biomarker values to diagnose the presence or absence of a hypoxic condition, or to provide a prognosis for a disease or condition that is associated with hypoxia, the performance threshold being indicative of an explained variance of at least 0.3; (b) determining a sample biomarker profile defining a combination of at least two (e.g., 2, 3, 4, 5, 6, 7, 8, 9, 10, or more) biomarker values corresponding to values of the at least two hypoxia biomarkers that are measured or derived from the subject following commencement of the treatment regimen, wherein the sample biomarker profile indicates whether the subject is responding positively or negatively to the treatment regimen, based on the correlation of the reference biomarker profile with the positive or negative response to the treatment regimen.

[0189] In related embodiments, the present invention further contemplates methods of determining a positive or negative response to a treatment regimen by a biological subject. In some embodiments, these methods comprise: (1) determining a sample biomarker profile defining biomarker values that are measured or derived for at least two (e.g., 2, 3, 4, 5, 6, 7, 8, 9, 10, or more) corresponding hypoxia biomarker of a subject following commencement of the treatment regimen, wherein the sample biomarker profile is correlated with a positive or negative response to the treatment regimen; and (2) determining whether the subject is responding positively or negatively to the treatment regimen based on the sample biomarker profile. In other embodiments, these methods comprise: (a) determining a sample biomarker profile defining a combination of at least two (e.g., 2, 3, 4, 5, 6, 7, 8, 9, 10, or more) biomarker values corresponding to values of at least two hypoxia biomarkers that are measured for or derived from a subject following commencement of the treatment regimen, wherein: (i) the at least two hypoxia biomarkers have a mutual correlation in respect of hypoxia, which lies within a mutual correlation range, the mutual correlation range being between ±0.9; and (ii) the combination of at least two biomarker values has a performance value greater than or equal to a performance threshold representing the ability of the combination of at least two biomarker values to diagnose the presence or absence of a hypoxic condition, or to provide a prognosis for a disease or condition that is associated with hypoxia, the performance threshold being indicative of an explained variance of at least 0.3, wherein the sample biomarker profile is correlated with a positive or negative response to the treatment regimen; and (b) determining whether the subject is responding positively or negatively to the treatment regimen based on the sample biomarker profile.

[0190] The above methods can be practiced to identify responders or non-responders relatively early in the treatment process, i.e., before clinical manifestations of efficacy. In this way, the treatment regimen can optionally be discontinued, a different treatment protocol can be implemented and/or supplemental therapy can be administered. Thus, in some embodiments, a sample hypoxia biomarker profile is obtained within about 2 hours, 4 hours, 6 hours, 12 hours, 1 day, 2 days, 3 days, 4 days, 5 days, 1 week, 2 weeks, 3 weeks, 4 weeks, 6 weeks, 8 weeks, 10 weeks, 12 weeks, 4 months, six months or longer of commencing therapy.

[0191] The present invention also contemplates methods in which the indicator-determining method of the invention is implemented using one or more processing devices. In some embodiments, these methods comprise: (1) determining a pair of biomarker values, the pair of biomarker values consisting of a first biomarker value indicative of a concentration of polynucleotide expression products of a group 1 hypoxia biomarker gene (e.g., ARNTL, CD1C, HHEX, KLRG1, MMP16, FGFR2, GATA2, CEACAM7, OGN, and AGTR1) and a group 2 hypoxia biomarker gene (e.g., G9a); (2) determining an indicator indicative of a ratio of the concentrations of the polynucleotide expression products using both biomarker values; (3) retrieving previously determined indicator references from a database, the indicator references being determined based on indicators determined from a reference population, one of the groups consisting of individuals diagnosed with a hypoxic condition; (4) comparing the indicator to the indicator references; (5) using the results of the comparison to determine a probability indicative of the subject having or not having a hypoxic condition; and (6) generating a representation of the probability, the representation being displayed to a user to allow the user to assess the likelihood of a biological subject having a hypoxic condition.

[0192] Similarly apparatus can be provided for determining the likelihood of a subject having a hypoxic condition, the apparatus including: (A) a sampling device that obtains a sample taken from a subject, the sample including polynucleotide expression products; (B) a measuring device that quantifies polynucleotide expression products within the sample to determine three biomarker values, at least one biomarker value consisting of: (a) a first pair of biomarker values indicative of a concentration of polynucleotide expression products of a group 1 hypoxia biomarker gene (e.g., ARNTL, CD1C, HHEX, KLRG1, MMP16, FGFR2, GATA2, CEACAM7, OGN, and AGTR1) and a group 2 hypoxia biomarker gene (e.g., G9a); (C) at least one processing device that: (i) receives an indication of the pair of biomarker values from the measuring device; (ii) determines an indicator using a ratio of the concentration of the first, second and third polynucleotide expression products using the biomarker values; (iii) compares the indicator to at least one indicator reference; (iv) determines a likelihood of the subject having or not having a hypoxic condition using the results of the comparison; and (v) generates a representation of the indicator and the likelihood for display to a user.

[0193] The present invention also encompasses methods for differentiating between hypoxia and normoxia in a subject. These methods suitably comprise: (a) obtaining a sample taken from a subject showing a clinical sign of a hypoxic condition (e.g., a hypoxic condition), the sample including polynucleotide expression products; (b) in a measuring device: (i) amplifying at least some polynucleotide expression products in the sample; (ii) determining an amplification amount representing a degree of amplification required to obtain a defined level of polynucleotide expression products including: amplification amounts for a first pair of polynucleotide expression products of a group 1 hypoxia biomarker gene (e.g., ARNTL, CD1C, HHEX, KLRG1, MMP16, FGFR2, GATA2, CEACAM7, OGN, and AGTR1) and a group 2 hypoxia biomarker gene (e.g., G9a); (c) in a processing system: (i) retrieving the amplification amounts; (ii) determining an indicator by: determining a first derived biomarker value indicative of a ratio of concentrations of the first pair of polynucleotide expression products by determining a difference between the amplification amounts for the first pair; (d) determining the indicator using the derived biomarker value; (e) retrieving previously determined indicator references from a database, wherein the indicator references are distributions of indicators determined for first and second groups of a reference population, the first and second groups consisting of individuals diagnosed with a hypoxic condition and the other with a normoxic condition, respectively; (f) comparing the indicator to the first and second indicator references; (g) using the results of the comparison to determine a probability of the subject being classified within the first or second group; (h) generating a representation at least partially indicative of the indicator and the probability; and (i) providing the representation to a user to allow the user to assess the likelihood of a subject having or not having a hypoxic condition or a normoxic condition.

[0194] Additionally, methods can be provided for determining an indicator used in assessing a likelihood of a subject having a presence or absence of a hypoxic condition, or in providing a prognosis for a disease or condition that is associated with hypoxia. These methods suitably include: (1) determining a plurality of biomarker values, each biomarker value being indicative of a value measured or derived for at least one corresponding hypoxia biomarker of the subject and being at least partially indicative of a concentration of the hypoxia biomarker in a sample taken from the subject; (2) determining the indicator using a combination of the plurality of biomarker values, wherein: at least two biomarkers have a mutual correlation in respect of a hypoxic condition that lies within a mutual correlation range, the mutual correlation range being between ±0.9; and the indicator has a performance value greater than or equal to a performance threshold representing the ability of the indicator to diagnose the presence or absence of a hypoxic condition, or to provide a prognosis for the disease or condition that is associated with hypoxia, the performance threshold being indicative of an explained variance of at least 0.3.

[0195] 2.8 Ancillary Treatments

[0196] In some embodiments, the treatment regimens described above or elsewhere herein comprise a combination therapy comprising administering a G9a antagonist together with an ancillary treatment.

[0197] It is well known that chemotherapy and radiation therapy target rapidly dividing cells and/or disrupt the cell cycle or cell division. These treatments are offered as part of the treating several forms of cancer and autoimmune disease, aiming either at slowing their progression or reversing the symptoms of disease by means of a curative treatment. In some embodiments, therefore, upon determining a likelihood that a subject has a hypoxic condition (for example, a cancer or tumor) a combination therapy can employ G9a inhibitor that is administered together with a chemotherapeutic agent, which is suitably selected from cytostatic agents and cytotoxic agents. Non-limiting examples of cytostatic agents are selected from: (1) microtubule-stabilizing agents such as but not limited to taxanes, paclitaxel, docetaxel, epothilones and laulimalides; (2) kinase inhibitors, illustrative examples of which include Iressa®, Gleevec, Tarceva™, (Erlotinib HCl), BAY-43-9006, inhibitors of the split kinase domain receptor tyrosine kinase subgroup (e.g., PTK787/ZK 222584 and SU11248); (3) receptor kinase targeted antibodies, which include, but are not limited to, Trastuzumab (Herceptin®), Cetuximab (Erbitux®), Bevacizumab (Avastin™), Rituximab (Ritusan®), Pertuzumab (Omnitarg™); (4) mTOR pathway inhibitors, illustrative examples of which include rapamycin and CCI-778; (5) Apo2L/Trail, anti-angiogenic agents such as but not limited to endostatin, combrestatin, angiostatin, thrombospondin and vascular endothelial growth inhibitor (VEGI); (6) antineoplastic immunotherapy vaccines, representative examples of which include activated T-cells, non-specific immune boosting agents (i.e., interferons, interleukins); (7) antibiotic cytotoxic agents such as but not limited to doxorubicin, bleomycin, dactinomycin, daunorubicin, epirubicin, mitomycin and mitozantrone; (8) alkylating agents, illustrative examples of which include Melphalan, Carmustine, Lomustine, Cyclophosphamide, Ifosfamide, Chlorambucil, Fotemustine, Busulfan, Temozolomide and Thiotepa; (9) hormonal antineoplastic agents, non-limiting examples of which include Nilutamide, Cyproterone acetate, Anastrozole, Exemestane, Tamoxifen, Raloxifene, Bicalutamide, Aminoglutethimide, Leuprorelin acetate, Toremifene citrate, Letrozole, Flutamide, Megestrol acetate and Goserelin acetate; (10) gonadal hormones such as but not limited to Cyproterone acetate and Medoxyprogesterone acetate; (11) antimetabolites, illustrative examples of which include Cytarabine, Fluorouracil, Gemcitabine, Topotecan, Hydroxyurea, Thioguanine, Methotrexate, Colaspase, Raltitrexed and Capicitabine; (12) anabolic agents, such as but not limited to, Nandrolone; (13) adrenal steroid hormones, illustrative examples of which include Methylprednisolone acetate, Dexamethasone, Hydrocortisone, Prednisolone and Prednisone; (14) neoplastic agents such as but not limited to Irinotecan, Carboplatin, Cisplatin, Oxaliplatin, Etoposide and Dacarbazine; and (15) topoisomerase inhibitors, illustrative examples of which include topotecan and irinotecan.

[0198] Illustrative cytotoxic agents can be selected from sertenef, cachectin, ifosfamide, tasonermin, lonidamine, carboplatin, altretamine, prednimustine, dibromodulcitol, ranimustine, fotemustine, nedaplatin, oxaliplatin, temozolomide (TEMODAR™ from Schering-Plough Corporation, Kenilworth, N.J.), cyclophosphamide, heptaplatin, estramustine, improsulfan tosilate, trofosfamide, nimustine, dibrospidium chloride, pumitepa, lobaplatin, satraplatin, profiromycin, cisplatin, doxorubicin, irofulven, dexifosfamide, cis-aminedichloro(2-methyl-pyridine)platinum, benzylguanine, glufosfamide, GPX100, (trans, trans, trans)-bis-mu-(hexane-1,6-diamine)-mu-[diamine-platinum(II)]bis[diamine(chloro)platinum(II)] tetrachloride, diarizidinylspermine, arsenic trioxide, 1-(11-dodecylamino-10-hydroxyundecyI)-3,7-dimethylxanthine, zorubicin, idarubicin, daunorubicin, bisantrene, mitoxantrone, pirarubicin, pinafide, valrubicin, amrubicin, antineoplaston, 3′-deansino-3′-morpholino-13-deoxo-10-hydroxycarminomycin, annamycin, galarubicin, elinafide, MEN10755, 4-demethoxy-3-deamino-3-aziridinyl-4-methylsulphonyl-daunombicin (see International Publication WO 00/50032), methoxtrexate, gemcitabine, and mixture thereof.

[0199] Radiotherapies include radiation and waves that induce DNA damage for example, γ-irradiation, X-rays, UV irradiation, microwaves, electronic emissions, radioisotopes, and the like. Therapy may be achieved by irradiating the localized tumor site with the above described forms of radiations. It is most likely that all of these factors effect a broad range of damage DNA, on the precursors of DNA, the replication and repair of DNA, and the assembly and maintenance of chromosomes.

[0200] Dosage ranges for X-rays range from daily doses of 50 to 200 roentgens for prolonged periods of time (3 to 4 weeks), to single doses of 2000 to 6000 roentgens. Dosage ranges for radioisotopes vary widely, and depend on the half life of the isotope, the strength and type of radiation emitted, and the uptake by the neoplastic cells.

[0201] Non-limiting examples of radiotherapies include conformal external beam radiotherapy (50-100 Grey given as fractions over 4-8 weeks), either single shot or fractionated, high dose rate brachytherapy, permanent interstitial brachytherapy, systemic radio-isotopes (e.g., Strontium 89). In some embodiments the radiotherapy may be administered in combination with a radiosensitizing agent. Illustrative examples of radiosensitizing agents include but are not limited to efaproxiral, etanidazole, fluosol, misonidazole, nimorazole, temoporfin and tirapazamine.

[0202] Chemotherapeutic agents may be selected from any one or more of the following categories:

[0203] (i) antiproliferative/antineoplastic drugs and combinations thereof, as used in medical oncology, such as alkylating agents (for example cis-platin, carboplatin, cyclophosphamide, nitrogen mustard, melphalan, chlorambucil, busulphan and nitrosoureas); antimetabolites (for example antifolates such as fluoropyridines like 5-fluorouracil and tegafur, raltitrexed, methotrexate, cytosine arabinoside and hydroxyurea; anti-tumor antibiotics (for example anthracyclines like adriamycin, bleomycin, doxorubicin, daunomycin, epirubicin, idarubicin, mitomycin-C, dactinomycin and mithramycin); antimitotic agents (for example vinca alkaloids like vincristine, vinblastine, vindesine and vinorelbine and taxoids like paclitaxel and docetaxel; and topoisomerase inhibitors (for example epipodophyllotoxins like etoposide and teniposide, amsacrine, topotecan and camptothecin);

[0204] (ii) cytostatic agents such as antiestrogens (for example tamoxifen, toremifene, raloxifene, droloxifene and idoxifene), oestrogen receptor down regulators (for example fulvestrant), antiandrogens (for example bicalutamide, flutamide, nilutamide and cyproterone acetate), UH antagonists or LHRH agonists (for example goserelin, leuprorelin and buserelin), progestogens (for example megestrol acetate), aromatase inhibitors (for example as anastrozole, letrozole, vorozole and exemestane) and inhibitors of 5a-reductase such as finasteride;

[0205] (iii) agents which inhibit cancer cell invasion (for example metalloproteinase inhibitors like marimastat and inhibitors of urokinase plasminogen activator receptor function);

[0206] (iv) inhibitors of growth factor function, for example such inhibitors include growth factor antibodies, growth factor receptor antibodies (for example the anti-erbb2 antibody trastuzumab [Herceptin™] and the anti-erbb1 antibody cetuximab [C225]), farnesyl transferase inhibitors, MEK inhibitors, tyrosine kinase inhibitors and serine/threonine kinase inhibitors, for example other inhibitors of the epidermal growth factor family (for example other EGFR family tyrosine kinase inhibitors such as N-(3-chloro-4-fluorophenyl)-7-methoxy-6-(3-morpholinopropoxy)quinazolin-4-amine (gefitinib, AZD1839), N-(3-ethynylphenyl)-6,7-bis(2-methoxyethoxy)quinazolin-4-amine (erlotinib, OSI-774) and 6-acrylamido-N-(3-chloro-4-fluorophenyl)-7-(3-morpholinopropoxy)quinazoli-n-4-amine (CI 1033)), for example inhibitors of the platelet-derived growth factor family and for example inhibitors of the hepatocyte growth factor family;

[0207] (v) anti-angiogenic agents such as those which inhibit the effects of vascular endothelial growth factor, (for example the anti-vascular endothelial cell growth factor antibody bevacizumab [Avastin™], compounds such as those disclosed in International Patent Applications WO 97/22596, WO 97/30035, WO 97/32856 and WO 98/13354) and compounds that work by other mechanisms (for example linomide, inhibitors of integrin αvβ3 function and angiostatin);

[0208] (vi) vascular damaging agents such as Combretastatin A4 and compounds disclosed in International Patent Applications WO 99/02166, WO00/40529, WO 00/41669, WO01/92224, WO02/04434 and WO02/08213;

[0209] (vii) antisense therapies, for example those which are directed to the targets listed above, such as ISIS 2503, an anti-ras antisense; and

[0210] (viii) gene therapy approaches, including for example approaches to replace aberrant genes such as aberrant p53 or aberrant GDEPT (gene-directed enzyme pro-drug therapy) approaches such as those using cytosine deaminase, thymidine kinase or a bacterial nitroreductase enzyme and approaches to increase patient tolerance to chemotherapy or radiotherapy such as multi-drug resistance gene therapy.

[0211] Immunotherapy approaches, include for example ex vivo and in vivo approaches to increase the immunogenicity of patient tumor cells, such as transfection with cytokines such as interleukin 2, interleukin 4 or granulocyte-macrophage colony stimulating factor, approaches to decrease T-cell anergy, approaches using transfected immune cells such as cytokine-transfected dendritic cells, approaches using cytokine-transfected tumor cell lines and approaches using anti-idiotypic antibodies. These approaches generally rely on the use of immune effector cells and molecules to target and destroy cancer cells. The immune effector may be, for example, an antibody specific for some marker on the surface of a malignant cell. The antibody alone may serve as an effector of therapy or it may recruit other cells to actually facilitate cell killing. The antibody also may be conjugated to a drug or toxin (chemotherapeutic, radionuclide, ricin A chain, cholera toxin, pertussis toxin, etc.) and serve merely as a targeting agent. Alternatively, the effector may be a lymphocyte carrying a surface molecule that interacts, either directly or indirectly, with a malignant cell target. Various effector cells include cytotoxic T cells and NK cells.

[0212] Examples of other cancer therapies include phototherapy, cryotherapy, toxin therapy or pro-apoptosis therapy. One of skill in the art would know that this list is not exhaustive of the types of treatment modalities available for cancer and other hyperplastic lesions.

[0213] In exemplary embodiments of this type, the group 1 hypoxia biomarker is a nucleic acid expression product, and the group 2 hypoxia biomarker is a polypeptide expression product.

[0214] In order that the invention may be readily understood and put into practical effect, particular preferred embodiments will now be described by way of the following non-limiting examples.

### EXAMPLES

### Example 1

### Hypoxia Stabilizes G9a Methyltransferase

[0215] In order to determine the mechanism by which hypoxia alters the level of G9a protein, MCF7 and MDA-MB-231 (MDA231) breast cancer cells were exposed to hypoxic conditions. Strikingly, a significant increase in G9a protein level was observed. This increase was detectable as early as three hours (FIG. 1A) while there was no significant change in two other methyltransferases that target H3K9 GLP and SUV39h1 (see, FIG. 1B)). To investigate whether this increase in G9a protein level was due to an increase in transcription of G9a, quantitative PCR (qPCR) was performed. It was found that G9a transcription was not altered, suggesting that it is post-transcriptionally regulated (see, FIG. 1C). Indeed, contacting cells with MG132 (a proteasomal inhibitor) resulted in an increase in G9a protein level in normoxia, but not in hypoxia (FIG. 1D), indicating that hypoxia-mediated regulation of G9a protein stability may involve perturbation of the proteasomal degradation pathway.

[0216] As protein ubiquitination is linked to proteasomal degradation we assessed the extent of G9a ubiquitination in normoxia and hypoxia. Ubiquitination assays revealed that polyubiquitination of G9a was significantly reduced in hypoxia (see, FIG. 1E). As G9a showed very similar stabilization dynamics to that of HIF-1a protein in hypoxia, the present inventors examined the effect of inhibiting prolyl hydroxylase domain (PHD) enzymes on G9a protein stability. The level of G9a polyubiquitination was markedly reduced with treatment of the prolyl hydroxylase inhibitor dimethyloxaloylglycine (DMOG) (see, FIG. 1F) consistent with the increase in G9a protein levels in both MCF7 and MDA231 breast cancer cells treated with either DMOG or deferoxamine (DFA) (see, FIGS. 1G and H).

[0217] Together, these data strongly suggest that hypoxic condition leads to G9a protein stabilization by inhibiting the activities of PHD enzymes and that this could facilitate changes in gene expression that are independent of HIFs.

### Materials and Methods

[0218] Cell Culture and Drug Treatments

[0219] Breast cancer cell lines were obtained from ATCC and cultured as per ATCC instructions. AT3 mammary adenocarcinoma, was maintained as previously described (in Ngiow, 2012). All cell lines were regularly tested for mycoplasma and authenticated using short tandem repeat profiling. UNC0642 was purchased from Sigma-Aldrich and MG132 (M-1157) from A.G. Scientific.

[0220] Ubiquitination Assay

[0221] The ubiquitination assay was performed as described previously (Lee, Mol. Cell, 2012). Briefly, cells were transfected with expression constructs including His-tagged ubiquitin and treated with 5 μg/ml of MG132 for 4 hrs, lysed in buffer A (6 M guanidinium-HCl, 100 mM sodium phosphate, 10 mM Tris-HCl (pH 8.0), 5 mM imidazole, and 10 mM β-mercaptoethanol), and incubated with Ni²⁺-NTA beads (QIAGEN) for 4 hrs at room temperature. The beads were then washed sequentially with buffer A, buffer B (8 M urea, 100 mM sodium phosphate buffer, 10 mM Tris-HCl (pH 8.0), and 10 mM β-mercaptoethanol), and buffer C (8 M urea, 100 mM sodium phosphate buffer, 10 mM Tris-HCl (pH 6.3), and 10 mM β-mercaptoethanol). Bound proteins were eluted with buffer D (200 mM imidazole, 150 mM Tris-HCl (pH 6.7), 30% glycerol, 0.72 M β-mercaptoethanol, and 5% SDS), and subject to immunoblot analysis.

### Example 2

### Prolyl Hydroxylation-Mediated G9a Degradation

[0222] Since inhibition of PHD enzyme activity leads to a change in G9a protein stability, we examined the interaction between G9a and known PHD enzymes by performing co-immunoprecipitation assays. From these experiments, it was clear that PHD1 and PHD3 were capable of physically interacting with G9a (see, FIG. 2A). However, hydroxyproline pull-down assays using anti-hydroxy prolyl antibody revealed that only PHD1 was able to hydroxylate G9a (see, FIG. 2B). Moreover, although G9a hydroxylation was readily detected in normoxic condition, it was almost completely undetectable in hypoxic condition (see, FIG. 2C). Because pVHL is known to be involved in degrading hydroxylated HIFa proteins (see, Ivan et al., 2001; and Jaakkola et al., 2001), a co-immunoprecipitation assay between G9a and pVHL was performed to determine whether G9a degradation was also regulated in a pVHL-dependent manner. In this regard, G9a showed an interaction with pVHL in normoxia but this interaction was significantly reduced in hypoxia (see, FIG. 2D). Moreover, the interaction between G9a and pVHL was significantly inhibited by DMOG treatment suggesting that G9a hydroxylation appears to be an essential modification required for G9a recognition by pVHL (see, FIG. 2E). The involvement of pVHL in regulating the G9a protein level in hypoxia was further confirmed in the RCC4 cell line in which pVHL is defective. Hypoxia-dependent stabilization of G9a was absent in RCC4 cells. However, expression of wild-type pVHL restored G9a sensitivity to hypoxia (see, FIG. 2F).

[0223] Based on the known consensus hydroxylation motif “LXXLXP”, we identified two potential proline hydroxylation sites on G9a at amino acid residues P606 and P1206. The two proline residues were mutated to alanine by site-directed mutagenesis to generate a G9a P2A mutant. The G9a P2A mutant failed to show hypoxia-dependent accumulation when expressed in G9a-deficient mouse embryonic fibroblasts (MEF), but appeared to show a higher level of protein in normoxia compared to that of wild-type G9a (see, FIG. 2G).

[0224] The present inventors then performed hydroxylation assays and found that while a considerable amount of proline hydroxylation was detected for wild-type G9a, no detectable level of proline hydroxylation was observed for the G9a P2A mutant (see, FIG. 2H).

[0225] These data clearly show that PHD1 and pVHL have important roles in regulating G9a protein stability.

### Materials and Methods

[0226] Antibodies

[0227] The following commercially available antibodies were used: anti-GFP (sc-8334) was purchased from Santa Cruz Biotechnology. Anti-HA (MMS-101P-500) was from Jomar Biosciences. Anti-H3 (ab1791), anti-H3K9me1 (ab9045), anti-H3K9me2 (ab1220), anti-H3K9me3 (ab8898), anti-RNA Polymerase II (ab817), anti-tubulin (ab6046), anti-pontin (ab51500), anti-LC3 (ab38394) and anti-hydroxyl proline (ab37067) were from Abcam. Anti-G9a (07-551), anti-GLP (B0422), anti-Lamin A/C (05-714) and anti-SUV39h1 (S8316) were from EMD Millipore. Anti-FLAG (F3165) was from Sigma Aldrich. Anti-HIF-1a (NB100-479), anti-PHD1(NB100-310), anti-PHD2 (NBP1-30328), and anti-PHD3 (NB100-303) were from Novus Biologicals.

[0228] shRNA Knock Down

[0229] shRNA-mediated knockdown cells were generated as previously described (Lee, Mol. Cell, 2010). To generate knockdown cells, retroviral shRNA constructs (shNS and shG9a) with viral packaging plasmids (pMD2.G and pMD-MLV) were transfected into HEK293T cells. Viral supernatant was collected after three days for using for target cell infection.

### Example 3

### Identification of G9a Target Genes and its Use as a Prognostic Indicator

[0230] In order to determine the functional consequence of G9a accumulation in hypoxic conditions, the present inventors performed a microarray analysis from RNA isolated from MCF7 cells expressing either non-silencing control shRNA (shNS) or G9a shRNA (shG9a) exposed to normoxic and hypoxic conditions. The global analysis investigated the general impact of hypoxia and G9a knockdown on gene expression. A Gaussian curve fitting was used to determine the applicable cut-offs in selecting genes that showed significant changes in response to hypoxia (methods as taught by Hwang et al., 2005). Hypoxia-responsive genes could be largely categorized as being upregulated genes or downregulated genes (see, FIG. 3A). Given the strong association between the G9a methyltransferase activity toward H3K9 methylation in gene silencing (see, Chen et al., 2010; and Yamamizu et al., 2012), G9a was investigated as a potential mediator of hypoxia-dependent gene repression (see, FIG. 3B). Among those genes downregulated by hypoxia, 36% of genes (i.e., 212 genes) appeared to be G9a-dependent as these genes were no longer downregulated by hypoxia in the G9a knock-down model. The remaining 64% of genes (i.e., 385 genes) were downregulated by hypoxia in a G9a-independent manner.

[0231] Given that tumor hypoxia is correlated with treatment resistance (Vaupel, 2004) and metastatic transformation of cancer cells (Joyce and Pollard, 2009), the present inventors tested whether genes repressed by G9a (but not hypoxia per se) are correlated with patient outcome. As breast cancer is heterogeneous and molecular subtypes have been well characterized, patient survival analysis was divided into estrogen receptor-positive (ER-positive) and estrogen receptor-negative (ER-negative) groups. The analysis was performed on these two groups in three large gene expression datasets for breast cancer; KM plotter, ROCK and TCGA (see, FIG. 4). The previously published hypoxic markers (13 genes, see, for example, Hu et al., 2009) as a marker for hypoxia in the tumors. With the same rationale of the in vitro studies, the present inventors identified those genes whose expression were inversely correlated to G9a expression and those whose expression were inversely correlated to hypoxia (determined by the hypoxic markers). These genes were then analyzed for commonality between the three datasets as shown in the Venn diagrams in FIG. 3D.

[0232] Ten genes were found that were common between at least two of the three datasets analyzed for each breast cancer subtypes (e.g., 10 genes for ER-positive; and 10 genes for ER-negative). Out of the 20 genes, there were 14 distinct genes with 6 genes overlapping. Out of these 14 genes, only 10 genes associated with relapse-free survival (see, FIG. 3C and FIG. 4). In order to determine whether these genes were prognostic, an association analysis was performed to find those genes that associated with poor relapse-free survival in the three datasets analyzed. The 10 genes identified in FIG. 3C (i.e., ARNTL, CD1C, HHEX, KLRG1, MMP16, FGFR2, GATA2, CEACAM7, OGN, and AGTR1) were analyzed for their association with relapse-free survival as a gene signature. The average expression of the 10 genes was used as a G9a-suppressed gene signature for each patient. Breast cancer cases in each of the three datasets (KM plotter, ROCK and TCGA) were allocated to one of four quartiles based on the G9a-suppressed gene signature, and relapse-free survival was compared (FIG. 3D-F). KM plotter breast cancer gene expression database contained the largest patient number analyzed (n=3524). Patients with the lowest expression of the G9a-suppressed signature (1st quartile; Q1 in black) were associated with a poorer relapse-free survival with only about 50% of patients surviving after 10 years, while the patients with the highest G9a-suppressed gene signature (quartile 4; Q4 in red) associated with significantly better survival with close to 80% of patients surviving (FIG. 3D). The ROCK and TCGA gene expression datasets also showed similar association between the G9a-suppressed gene signature and relapse-free survival, further strengthening the prognostic power of the G9a-suppressed gene signature. In the ER-positive patient group, patient group with the lowest expression of the G9a-suppressed gene signature (1st quartile in black) was associated with significantly poorer survival compared to the rest of the group (rest in red). In the ER-negative patient group the patient stratification using the G9a-suppressed gene signature was not as efficient as the ER-positive group. Further, breast cancer patients were divided into four histopathological subtypes (luminal A, luminal B, HER2-enriched, and basal-like). Survival of the patients with the lowest G9a-suppressed gene signature was compared to the rest of the patients within each group (FIG. 3F). The G9a-suppressed gene signature was able to identify a distinct patient group associated with a poor survival (1st quartile) in all subgroups except for the basal-like group. Notably, six genes (i.e., ARNTL, CEACAM7, GATA2, HHEX, KLRG1 and OGN) of the gene signature have been reported to possess tumor suppressor activity (Li et al., 2014; Hu et al., 2016; Li et al., 2014; Noy et al., 2010; Kershaw et al., 2014; Scholzel et al., 2000).

### Materials and Methods

[0233] Microarray Analysis

[0234] Briefly, MCF7 cells transfected with non-silencing control shRNA or shRNA targeting G9a were exposed to normoxia or hypoxia for 9 h, and total RNA was isolated with the RNAeasy Mini Kit (Qiagen); 500 ng of total RNA was used for microarray analysis. The Microarray analysis was performed using the Affymetrix Human Gene 1.0 ST Array by the Seoul National University Genome Research Facility.

### Example 4

### Functional Role of G9a Accumulation

[0235] Upon verifying the prognostic value of the G9a-suppressed gene signature using patient survival data, the present inventors tested the ability of a G9a inhibitor to reverse G9a-mediated suppression. Expression of the 10 G9a-suppressed genes was analyzed by real-time qPCR. The expression of all 10 genes was significantly downregulated by hypoxia in control cells, while this repression was abolished by treating cells with UNC0642, a small molecule inhibitor of G9a methyltransferase activity (see, FIG. 4A). This shows that their expression is controlled via G9a-mediated actions. To understand the molecular mechanism by which hypoxia-mediated accumulation of G9a results in the repression of specific genes, chromatin immunoprecipitation (ChIP) was performed on promoters of the 10 G9a-repressed genes (see, FIG. 4B and Figure S4). Hypoxia significantly increased H3K9me2 at the promoters of these genes and correlated with transcriptional silencing (FIG. 4B). Hypoxia-mediated increase in H3K9me2 was almost completely abrogated or significantly reduced in promoters of G9a-repressed genes with G9a knockdown or with UNC0642 treatment (see, FIGS. 4B and 4C). Together, these results support the mechanism by which G9a represses transcription of specific genes via increasing H3K9me2, and that this increase in H3K9me2 can be abrogated by the use of small molecule inhibitor of G9a.

[0236] Effects of G9a inhibition in breast cancer cell lines using a small molecule inhibitor.

[0237] In order to determine the molecular function of G9a, the present inventors utilized the gene expression data acquired in FIG. 3 and performed a functional annotation network analysis through the use of Ingenuity Pathway Analysis (IPA®, QIAGEN, Redwood City). Several molecular and cellular pathways related to cellular growth and development were identified as affected (see, FIG. 6A). It also predicted that G9a-suppressed gene signature was associated with increased survival (see, FIG. 6B). Western immunoblotting analysis was performed to determine G9a protein levels in 14 different breast epithelial cells including normal-like (namely, MCF10A and Bre80 cells), four ER-positive (namely, ZR751, BT474, T47D and MCF7 cells) and eight ER-negative subtypes (namely, HCC1937, HS578-T, BT549, SKBr3, MDA231, MDA157, MDA436 and MDA468 cells). Most breast cancer cell lines expressed higher level of G9a protein in normoxia compared to that observed in normal-like breast epithelial cells (see, FIG. 6A). Upon evaluating the therapeutic potential of inhibiting G9a in these breast cancer cell lines using UNC0642 revealed that cell survival was unaffected in normal-like Bre80 and MCF10A breast epithelial cells, while survival of cancer cell lines was significantly attenuated by UNC0642 treatment (see, FIG. 6D). MCF7 and MDA231 cells were selected to further characterize the effect of UNC0642. Proliferation was evaluated by performing real time cell imaging using the IncuCyte Zoom where cells were grown for 48 hours in the presence or in absence of various concentrations of UNC0642 (see, FIGS. 6E and 6A). Inhibiting G9a resulted in a dose-dependent reduction in proliferation compared to vehicle control. The confluency of UNC0642 treated cells (2-3 μM) at the end of the experiment was 2 to 2.5-fold less compared to vehicle control (see, FIG. 6E). The inhibitory effect of UNC0642 on cellular proliferation and survival in both normoxic and hypoxic conditions was confirmed by performing SRB assay in which less than 20% of cells were present after 48 hour treatment in MCF7 (see, FIG. 6F) and MDA231 (see, FIG. 6G). A significant reduction in global H3K9me2 was observed (see, FIG. 6H) suggesting that the dose used was effectively inhibiting G9a methyltransferase activity. Since a considerable number of genes identified from the gene expression analyzes were those involved in cell-to-cell signaling and interaction (see, FIG. 6A), the present inventors examined whether pharmacologic inhibition of G9a impacts breast cancer cell motility by performing scratch wound assay, under normoxic and hypoxic conditions.

[0238] A scratch wound assay revealed that UNC0642 was able to inhibit cellular migration as demonstrated by the greater denuded area observed in the treated cells compared with vehicle control (FIGS. 7A and B). The inhibitory effect of UNC0642 on cellular migration was also evident in hypoxic condition in which cells were not able to close the wound even after 72 hours.

[0239] A further scratch wound assay comparing MCF7 (ER-positive) cells expressing shNS and shG9a in hypoxic condition demonstrated that G9a knockdown leads to a reduction in the cells ability to migrate (see, FIGS. 7C and D). Together, these results evidence the oncogenic function of G9a in enhancing cellular proliferation and migration.

### Materials and Methods

[0240] Quantitative Real-Time RT-PCR and ChIP Assays

[0241] Quantitative RT-PCR and ChIP assays were conducted as previously described.

[0242] Briefly, total RNA was isolated using Trizol (Invitrogen) and reverse transcription was performed from 2.5 μg of total RNA using the Superscript III cDNA synthesis kit (Invitrogen). The abundance of mRNA was detected by an ABI VIIA7 system with SYBR Green Master Mix (Life Technologies). Primer pairs were designed to amplify 90-150 bp mRNA specific fragments and were confirmed as unique products by melting curve analysis. The quantity of mRNA was calculated using ΔΔCt method and normalized by using primers to detect HPRT. All reactions were performed in triplicates.

[0243] See Table 7 for primer sequences used.

TABLE 7
ChIP Primers (5′-3′)

| | | |
|---|---|---|
| AGTR1 | FWD | TCATCCTTGCTGCCGTCAAT |
| | REV | CGTTGCTGCTTCTTGGGTTC |
| ARNTL | FWD | GACCTGAGGGGAAAGGGAGA |
| | REV | CTGCTACTTTCCTGCCACCA |
| CD1C | FWD | TGGAGAGTGGAGGCAAAGTT |
| | REV | TCCCTCTGGATTTTGCATGTCA |
| CEACAM7 | FWD | CTCTGTCACCTTCCTGCTGG |
| | REV | ACCTATGCTGTGTTCTGGCC |
| FGFR2 | FWD | AAACAACGTAACGCAGTCGC |
| | REV | AGCGACAGCCTCCGAATAAG |
| GATA2 | FWD | CACTTCCTTGCTTCCCCCAT |
| | REV | GTTTAGCTAAGTGCAGGCGC |
| HHEX | FWD | GTCCGAGGCCTCCAAATGAA |
| | REV | GCGCTCCCTGGATTAACAGT |
| KLRG1 | FWD | CACCACCACACCCAGCTAAT |
| | REV | CGCCTGTAATCCCAGCACTT |
| MMP16 | FWD | CGTTTTTAGATGCGAGGCGG |
| | REV | GACAGTATCTCCCATCCCGC |
| OGN | FWD | GCAGACTGAGTGCAGCAGTT |
| | REV | AAAATTTCAGGGCCCAGCAG |

qRT-PCR Primers (5′-3′)

| | | |
|---|---|---|
| G9a | FWD | CATTTCCGCATGAGTGATGATGT |
| | REV | GGCAGAACCTAACTCCTCCGA |
| AGTR1 | FWD | GGCTATTGTTCACCCAATGAAGT |
| | REV | TGGGACTCATAATGGAAAGCAC |
| ARNTL | FWD | CATTAAGAGGTGCCACCAATCC |
| | REV | TCATTCTGGCTGTAGTTGAGGA |
| CD1C | FWD | GCATCCCAGGAACACGTCTC |
| | REV | GCCATGAGTCTGCAACTCGT |
| CEACAM7 | FWD | TCAGCCTGTCCATACAGAGTG |
| | REV | TTGAACGGCACGACATCAATA |
| FGFR2 | FWD | GGAAAGTGTGGTCCCATCTGA |
| | REV | TCCAGGTGGTACGTGTGATTG |
| GATA2 | FWD | CAGCAAGGCTCGTTCCTGTT |
| | REV | GGCTTGATGAGTGGTCGGT |
| HHEX | FWD | TCAGAATCGACGCGCTAAATG |
| | REV | AGAGCTATCCAAAGAAGCACCT |
| KLRG1 | FWD | CCAGACCGCTGGATGAAATATG |
| | REV | CTGATTGTCCGTTATCACAAGGA |
| MMP16 | FWD | AGCACTGGAAGACGGTTGG |
| | REV | CTCCGTTCCGCAGACTGTA |
| OGN | FWD | TCTACACTTCTCCTGTTACTGCT |
| | REV | GAGGTAATGGTGTTATTGCCTCA |

[0244] IncuCyte Real-Time Imaging, Sulforhodamine B (SRB) and MU Assays

[0245] For proliferation studies, cells (5×10³) were seeded in 96-place wells and allowed to attach overnight, and then incubated in fresh growth medium in the presence of either the G9a inhibitor UNC0642 (Sigma Aldrich) or the vehicle control DMSO (Sigma Aldrich). Proliferation was evaluated via real-time imaging using IncuCyte Zoom (Essen BioScience) or by performing SRB assays at the end of the treatment. For SRB assays, medium was aspirated and cells were fixed in methylated spirits before being washed with water and stained with SRB (Sigma Aldrich) solution (0.4% in 1% acetic acid). The intensity of the staining was obtained using an optical plate reader at 564 nm. Cell viability was determined using a 3-(4,5-dimethylthiazol-2-yl)-2,5-diphenyltetrazolium bromide (MU) assay. Cells (3×10³/well) were seeded directly into 96-well plates and allowed to adhere overnight. 96 hours after drug treatment, 20 μL of MU (5 mg/mL; Sigma-Aldrich) was added. The plates were incubated at 37° C. for 3 hrs before the supernatants were removed, and 100 μL of isopropanol was added to each well. The absorbance value (optical density) of each well was measured at 570 nm.

[0246] Meta-Analysis of Breast Cancer Global Gene Expression

[0247] The genes identified from the microarray analysis (212 genes) were investigated in three large gene expression datasets from breast cancer; TCGA, ROCK and KM plotter datasets. The breast cancer cases in each of the three datasets (TCGA, ROCK and KM plotter) were allocated to one of four quartiles based on the hypoxia-G9a signature and the survival of these patients were compared. We also used the KM Plotter dataset (version 2014) to compare the relapse-free survival of breast cancer patients between tumors with the lowest expression (bottom 25%, quartile 1) to the rest of the tumors. Survival curves were constructed using GraphPad Prism v 6.0 (GraphPad Software, San Diego, Calif., USA), and the log-rank (Mantel-Cox) Test was used for statistical comparisons of survival curves.

### Example 5

### Gsa Inhibition Reduces Tumor Growth In Vivo

[0248] To determine the effect of inhibiting G9a methyltransferase activity on tumor growth, AT3 syngeneic mammary tumor cells were subcutaneously injected into C57BL/6 mice and allowed to form palpable tumors (over 2 weeks) before administering the UNC0642 G9a inhibitor (FIG. 8A). Consistent with the in vitro data, administration of UNC0642 significantly reduced tumor growth (FIG. 8B). The mean tumor volume was significantly lower in the UNC0642 treated group compared to that of the vehicle treated group at end-point (FIG. 8C) demonstrating that tumor growth can be suppressed by administering G9a inhibitor in vivo.

### Materials and Methods

[0249] C57BL/6 mice were purchased from the ARC Animal Resources Center. Groups of 8 to 10 mice per experiment were used for experimental tumor assays to ensure adequate power to detect biologic differences. All experiments were approved by the QIMR Berghofer Medical Research Institute Animal Ethics Committee. A total of 1×10⁶ AT3 tumor cells were subcutaneously injected into mice in a 100 μL volume (on day 0) and UNC0642 administered every two days between days 16 and day 36. Tumor growth was measured using a digital calliper, and tumor volumes are presented as mean±SEM.

### Example 6

### Gsa Signature as a Prognostic Indicator

[0250] In order to demonstrate that the identified hypoxia markers are suitable for clinical diagnosis and/or prognosis, the biomarkers identified in the above breast cancer model were assessed in other hypoxic cancer types (i.e., kidney clear cell carcinoma and lung adenocarcinoma). FIG. 9A and FIG. 9B show patient survival curves in a retrospective meta-analysis of patient survival. Patients were stratified according to their average expression of the 10 above-identified hypoxia biomarkers.

[0251] Data from patients with kidney clear cell carcinoma (from the Cancer Genome Atlas (TCGA) was divided into quartiles (FIG. 9A) and the lung adenocarcinoma patient dataset from Kaplan Meyer Plotter was divided into two groups as dependent on whether they expressed “Low” or “High” levels of the hypoxia biomarkers. In both cancer-types, patients expressing high levels of the hypoxia biomarkers were demonstrated to be associated with a better survival chance when compared to those with lower expression levels of the hypoxia biomarkers.

[0252] Next, patients with melanoma were analyzed. FIG. 9C demonstrates that G9a expression is also associated with the survival outcome of melanoma and specifically, patients expressing a low amount of G9a protein are more likely to survive the disease than those expressing a high amount (FIG. 9C). Similarly, FIG. 9D shows that a low level of G9a protein correlates with an increased likelihood that the patient will remain relapse-free than patients with a high amount of G9a protein.

[0253] G9a expression also associates with survival outcome specifically in metastatic melanoma. For example, the overall survival of patients stratified using G9a expression was compared between all melanoma patients (471 patients; left hand graph) and metastatic patients (368 patients; right hand graph) and found that in both groups overall survival rates increased with those subjects with a low level of G9a protein.

[0254] Patients were allocated into one of four quartiles based on the average expression of a subset of hypoxic biomarkers (i.e., ARNTL, CD1C, HHEX, KLRG1 and MMP16). The subset of hypoxia biomarkers clearly associates with overall survival and relapse-free survival in melanoma. Patients with higher average expression (e.g., 4th Quartile) associated with a better overall survival (left-hand graph) and relapse-free survival (right-hand graph) as compared to those with lower expression (e.g., Quartile 1).

[0255] The disclosure of every patent, patent application, and publication cited herein is hereby incorporated herein by reference in its entirety.

[0256] The citation of any reference herein should not be construed as an admission that such reference is available as “Prior Art” to the instant application.

[0257] Throughout the specification the aim has been to describe the preferred embodiments of the invention without limiting the invention to any one embodiment or specific collection of features. Those of skill in the art will therefore appreciate that, in light of the instant disclosure, various modifications and changes can be made in the particular embodiments exemplified without departing from the scope of the present invention. All such modifications and changes are intended to be included within the scope of the appended claims.

### BIBLIOGRAPHY

[0258] Harris A L (2002) Hypoxia—a key regulatory factor in tumor growth. Nat Rev Cancer 2(1): 38-47.
[0259] Semenza G L (2003) Targeting HIF-1 for cancer therapy. Nat Rev Cancer 3(10): 721-732.
[0260] Vaupel P (2004) Tumor microenvironmental physiology and its implications for radiation oncology. Semin Radiat Oncol 14(3): 198-206.
[0261] Bache M, Kappler M, Said H M, Staab A, & Vordermark D (2008) Detection and specific targeting of hypoxic regions within solid tumors: current preclinical and clinical strategies. Curr Med Chem 15(4): 322-338.
[0262] Erler J T, et al. (2004) Hypoxia-mediated down-regulation of Bid and Bax in tumors occurs via hypoxia-inducible factor 1-dependent and -independent mechanisms and contributes to drug resistance. Mol Cell Biol 24(7): 2875-2889.
[0263] Semenza G L (2000) Hypoxia, clonal selection, and the role of HIF-1 in tumor progression. Crit Rev Biochem Mol Biol 35(2): 71-103.
[0264] Hill R P, Marie-Egyptienne D T, & Hedley D W (2009) Cancer stem cells, hypoxia and metastasis. Semin Radiat Oncol 19(2): 106-111.
[0265] Pennacchietti 5, et al. (2003) Hypoxia promotes invasive growth by transcriptional activation of the met protooncogene. Cancer Cell 3(4): 347-361.
[0266] Chang Q, Jurisica I, Do T, & Hedley D W (2011) Hypoxia predicts aggressive growth and spontaneous metastasis formation from orthotopically grown primary xenografts of human pancreatic cancer. Cancer Res 71(8): 3110-3120.
[0267] McGary E C, Lev D C, & Bar-Eli M (2002) Cellular adhesion pathways and metastatic potential of human melanoma. Cancer Bio Ther 1(5): 459-465.
[0268] Lee H K, Lee D S, & Park J C (2015) Nuclear factor I-C regulates E-cadherin via control of KLF4 in breast cancer. BMC Cancer 15: 113.
[0269] Scully O J, Bay B H, Yip G, & Yu Y (2012) Breast cancer metastasis. Cancer Gen Prot proteomics 9(5): 311-320.
[0270] Ema M, et al. (1997) A novel bHLH-PAS factor with close sequence similarity to hypoxia-inducible factor lalpha regulates the VEGF expression and is potentially involved in lung and vascular development. Proc Natl Acad Sci USA 94(9): 4273-4278.
[0271] Semenza G L & Wang G L (1992) A nuclear factor induced by hypoxia via de novo protein synthesis binds to the human erythropoietin gene enhancer at a site required for transcriptional activation. Molecular and cellular biology 12(12): 5447-5454.
[0272] Dewhirst M W, Cao Y, & Moeller B (2008) Cycling hypoxia and free radicals regulate angiogenesis and radiotherapy response. Nat Rev Cancer 8(6): 425-437.
[0273] Poon E, Harris A L, & Ashcroft M (2009) Targeting the hypoxia-inducible factor (HIF) pathway in cancer. Expert Rev Mol Med 11: e26.
[0274] Ivan M, et al. (2001) HlFalpha targeted for VHL-mediated destruction by proline hydroxylation: implications for O₂ sensing. Science 292(5516): 464-468.
[0275] Jaakkola P, et al. (2001) Targeting of HIF-alpha to the von Hippel-Lindau ubiquitylation complex by O₂-regulated prolyl hydroxylation. Science 292(5516): 468-472.
[0276] Maxwell P H, et al. (1999) The tumor suppressor protein VHL targets hypoxia-inducible factors for oxygen-dependent proteolysis. Nature 399(6733): 271-275.
[0277] Ohh M, et al. (2000) Ubiquitination of hypoxia-inducible factor requires direct binding to the beta-domain of the von Hippel-Lindau protein. Nat Cell Biol 2(7): 423-427.
[0278] Yun Z, Maecker H L, Johnson R S, & Giaccia A J (2002) Inhibition of PPAR gamma 2 gene expression by the HIF-1-regulated gene DEC1/Stra13: a mechanism for regulation of adipogenesis by hypoxia. Dev Cell 2(3): 331-341.
[0279] Chakrabarti J, et al. (2004) The transcription factor DEC1 (stral3, SHARP2) is associated with the hypoxic response and high tumor grade in human breast cancers. Br 3 Cancer 91(5): 954-958.
[0280] Ivanov S V, Salnikow K, Ivanova A V, Bai L, & Lerman M I (2007) Hypoxic repression of STAT1 and its downstream genes by a pVHL/HIF-1 target DEC1/STRA13. Oncogene 26(6): 802-812.
[0281] Tachibana M, et al. (2005) Histone methyltransferases G9a and GLP form heteromeric complexes and are both crucial for methylation of euchromatin at H3-K9. Genes Dev 19(7): 815-826.
[0282] Chen M W, et al. (2010) H3K9 histone methyltransferase G9a promotes lung cancer invasion and metastasis by silencing the cell adhesion molecule Ep-CAM. Cancer Res 70(20): 7830-7840.
[0283] Dong C, et al. (2012) G9a interacts with Snail and is critical for Snail-mediated E-cadherin repression in human breast cancer. J Clin Invest 122(4): 1469-1486.
[0284] Liu 5, et al. (2015) G9a is essential for EMT-mediated metastasis and maintenance of cancer stem cell-like characters in head and neck squamous cell carcinoma. Oncotarget 6(9): 6887-6901.
[0285] Zhong X, et al. (2015) Overexpression of G9a and MCM7 in oesophageal squamous cell carcinoma is associated with poor prognosis. Histopathology 66(2): 192-200.
[0286] Hua K T, et al. (2014) The H3K9 methyltransferase G9a is a marker of aggressive ovarian cancer that promotes peritoneal metastasis. Mol Cancer 13: 189.
[0287] Wozniak R J, Klimecki W T, Lau S S, Feinstein Y, & Futscher B W (2007) 5-Aza-2′-deoxycytidine-mediated reductions in G9A histone methyltransferase and histone H3 K9 di-methylation levels are linked to tumor suppressor gene reactivation. Oncogene 26(1): 77-90.
[0288] Chen H, Yan Y, Davidson T L, Shinkai Y, & Costa M (2006) Hypoxic stress induces dimethylated histone H3 lysine 9 through histone methyltransferase G9a in mammalian cells. Cancer Res 66(18): 9009-9016.
[0289] Hwang D, et al. (2005) A data integration methodology for systems biology: experimental verification. Proc Natl Acad Sci USA 102(48): 17302-17307.
[0290] Yamamizu K, et al. (2012) Protein kinase A determines timing of early differentiation through epigenetic regulation with G9a. Cell Stem Cell 10(6): 759-770.
[0291] Joyce J A & Pollard J W (2009) Microenvironmental regulation of metastasis. Nature reviews. Cancer 9(4): 239-252.
[0292] Hu Z, et al. (2009) A compact VEGF signature associated with distant metastases and poor outcomes. BMC medicine 7: 9.
[0293] Li L, et al. (2014) Quantitative proteomics approach to screening of potential diagnostic and therapeutic targets for laryngeal carcinoma. PloS One 9(2):e90181.
[0294] Hu Q P, Kuang J Y, Yang Q K, Bian X W, & Yu S C (2016) Beyond a tumor suppressor: Soluble E-cadherin promotes the progression of cancer. IntJ Cancer 138(12): 2804-2812.
[0295] Li Y W, et al. (2014) Decreased expression of GATA2 promoted proliferation, migration and invasion of HepG2 in vitro and correlated with poor prognosis of hepatocellular carcinoma. PloS One 9(1): e87505.
[0296] Noy P, Williams H, Sawasdichai A, Gaston K, & Jayaraman P S (2010) PRH/Hhex controls cell survival through coordinate transcriptional regulation of vascular endothelial growth factor signaling. Mol Cell Biol 30(9): 2120-2134.
[0297] Kershaw R M, Siddiqui Y H, Roberts D, Jayaraman P S, & Gaston K (2014) PRH/HHex inhibits the migration of breast and prostate epithelial cells through direct transcriptional regulation of Endoglin. Oncogene 33(49): 5592-5600.
[0298] Scholzel 5, et al. (2000) Carcinoembryonic antigen family members CEACAM6 and CEACAM7 are differentially expressed in normal tissues and oppositely deregulated in hyperplastic colorectal polyps and early adenomas. Am J Path 156(2): 595-605.
[0299] Messick C A, et al. (2010) CEACAM-7: a predictive marker for rectal cancer recurrence. Surgery 147(5): 713-719.
[0300] Yeh C M, et al. (2014) Epigenetic silencing of ARNTL, a circadian gene and potential tumor suppressor in ovarian cancer. Int J Oncology 45(5): 2101-2107.
[0301] Tachibana M, Matsumura Y, Fukuda M, Kimura H, & Shinkai Y (2008) G9a/GLP complexes independently mediate H3K9 and DNA methylation to silence transcription. EMBO J 27(20): 2681-2690.
[0302] Ma D K, Chiang C H, Ponnusamy K, Ming G L, & Song H (2008) G9a and Jhdm2a regulate embryonic stem cell fusion-induced reprogramming of adult neural stem cells. Stem Cells 26(8): 2131-2141.
[0303] Mole D R, et al. (2009) Genome-wide association of hypoxia-inducible factor (HIF)-lalpha and HIF-2alpha DNA binding with expression profiling of hypoxia-inducible transcripts. J Biol Chem 284(25): 16767-16775.
[0304] Pugh C W, Ratcliffe P J (2003) Regulation of angiogenesis by hypoxia: role of the HIF system. Nat Med 9(6): 677-684.
[0305] Lee J S, et al. (2010) Negative regulation of hypoxic responses via induced Reptin methylation. Mol Cell 39(1): 71-85.
[0306] Lee J S, et al. (2011) Hypoxia-induced methylation of a pontin chromatin remodeling factor. Proc Natl Acad Sci USA 108(33): 13510-13515.
[0307] Baselga J, et al. (2012) Everolimus in postmenopausal hormone-receptor-positive advanced breast cancer. New Eng J Med 366(6): 520-529.
[0308] Figueroa-Magalhaes M C, Jelovac D, Connolly R M, & Wolff A C (2014) Treatment of HER2-positive breast cancer. Breast 23(2): 128-136.
[0309] Ngiow S F, et al. (2012) Anti-TIM3 antibody promotes T cell IFN-gamma-mediated antitumor immunity and suppresses established tumors. Cancer research 71(10): 3540-3551.
   GATA2, CEACAM7, OGN, and AGTR1; (2) determining an indicator using the biomarker value(s); and (3) administering an effective amount of a G9a antagonist to the subject on the basis that the indicator is at least partially indicative of the likelihood of the presence of the hypoxic condition in the subject.

6. A method of reducing the malignancy of a hypoxic tumor in a subject, the method comprising, consisting, or consisting essentially of: (1) determining a biomarker value that is measured or derived for at least one hypoxia biomarker (e.g., 1, 2, 3, 4, 5, 6, 7, 8, 9, or 10 hypoxia biomarkers) in a sample obtained from the subject, wherein the at least one hypoxia biomarker is selected from ARNTL, CD1C, HHEX, KLRG1, MMP16, FGFR2, GATA2, CEACAM7, OGN, and AGTR1; (2) determining an indicator using the biomarker value(s); and (3) administering an effective amount of a G9a antagonist to the subject on the basis that the indicator is at least partially indicative of the likelihood that the tumor is hypoxic.

7. A method of treating a hypoxic tumor in a subject, the method comprising, consisting, or consisting essentially of: (1) determining a biomarker value that is measured or derived for at least one hypoxia biomarker (e.g., 1, 2, 3, 4, 5, 6, 7, 8, 9, or 10 hypoxia biomarkers) in sample obtained from the subject, wherein the at least one hypoxia biomarker is selected from ARNTL, CD1C, HHEX, KLRG1, MMP16, FGFR2, GATA2, CEACAM7, OGN, and AGTR1; and (2) determining an indicator using the biomarker value(s); and (3) administering an effective amount of a G9a antagonist to the subject on the basis that the indicator is at least partially indicative of the likelihood that the tumor is hypoxic.

8. The method of any one of claims 5 to 7, wherein the subject is administered with an ancillary treatment.

9. The method of claim 8, wherein the ancillary treatment is chemotherapy and/or radiotherapy.

10. The method of any one of claims 1 to 9, wherein the indicator comprises a biomarker value for at least 2, 3, 4, 5, 6, 7, 8, 9, 10, 15, 20 (and every integer in between) hypoxia biomarkers.

11. The method of any one of claims 1 to 10, wherein the sample is a biological sample.

12. The method of claim 11, wherein the biological sample comprises tumor cells.

13. The method of claim any one of claims 1 to 12, wherein the at least one hypoxia biomarker is selected from the group consisting of: (a) a polynucleotide expression product comprising a nucleotide sequence that shares at least 70% (or at least 71% to at least 99% and all integer percentages in between) sequence identity with the sequence set forth in any one of SEQ ID NO: 1-10, or a complement thereof; (b) a polynucleotide expression product comprising a nucleotide sequence that encodes a polypeptide comprising the amino acid sequence set forth in any one of SEQ ID NO: 202-211; (c) a polynucleotide expression product comprising a nucleotide sequence that encodes a polypeptide that shares at least 70% (or at least 71% to at least 99% and all integer percentages in between) sequence similarity or identity with at least a portion of the sequence set forth in SEQ ID NO: 202-211; (d) a polynucleotide expression product comprising a nucleotide sequence that hybridizes to the sequence of (a), (b), (c) or a complement thereof, under medium or high stringency conditions; (e) a polypeptide expression product comprising the amino acid sequence set forth in any one of SEQ ID NO: 202-211; and (f) a polypeptide expression product comprising an amino acid sequence that shares at least 70% (or at least 71% to at least 99% and all integer percentages in between) sequence similarity or identity with the sequence set forth in any one of SEQ ID NO: 202-211.

14. The method of any one of claims 1 to 13, wherein the biomarker value is at least partially indicative of a concentration of the at least one hypoxia biomarker in the sample obtained from the subject.

15. The method of any one of claims 1 to 13, wherein the biomarker value is at least partially indicated of the level of gene expression of the at least one hypoxia biomarker in the sample obtained from the subject.

16. The method of any one of claims 1 to 13, wherein the biomarker value includes the abundance of the biomarker.

17. The method of any one of claims 1 to 16 wherein the level of the at least one hypoxia biomarker is reduced relative to the level of the biomarker that correlates with the presence of normal (i.e., non-hypoxic) conditions, and the indicator is thereby determined to be at least partially indicative of a hypoxia.

18. A method according to any one of claims 1 to 16, wherein the level of the at least one hypoxia biomarker is about the same as the level of the biomarker that correlates with the presence of normal (i.e., non-hypoxic) conditions, and the indicator is determined to be at least partially indicative of a normoxia

19. A method of determining an indicator used in assessing a likelihood of the presence or absence of a hypoxic condition (e.g., a hypoxic cancer) in a subject, the method comprising, consisting or consisting essentially of: (1) determining a biomarker value that is measured or derived for at least one group 1 hypoxia biomarker (e.g., 1, 2, 3, 4, 5, 6, 7, 8, 9 or 10 hypoxia biomarkers) in a sample obtained from the subject, wherein the at least one hypoxia biomarker is selected from ARNTL, CD1C, HHEX, KLRG1, MMP16, FGFR2, GATA2, CEACAM7, OGN, and AGTR1; (2) determining a biomarker value that is measured or derived for a group 2 hypoxia biomarker, wherein the group 2 hypoxia biomarker is G9a; and (3) determining the indicator using the biomarker values, wherein the indicator is at least partially indicative of the likelihood of the presence or absence of the hypoxic condition in the subject.

20. The method of claim 19, wherein the method further comprises applying a combining function to the at least one group 1 hypoxia biomarker value(s) and the group 2 hypoxia biomarker

21. A method according to claim 19 or claim 20, wherein the indicator is a ratio of the biomarker values recorded on the group 1 hypoxia biomarker and the group 2 hypoxia biomarkers.

22. The method of any one of claims 1 to 21, wherein the biomarker value(s) is(are) measured using microscopy, flow cytometry, immunoassays, mass spectrometry, sequencing platforms, array and hybridization platforms, or a combination thereof.

23. A composition for determining an indicator used in assessing a likelihood of hypoxia, the composition comprising, consisting, or consisting essentially of at least one cDNA and at least one oligonucleotide primer or probe that hybridizes to the cDNA, wherein the at least one cDNA is a selected from ARNTL, CD1C, HHEX, KLRG1, MMP16, FGFR2, GATA2, CEACAM7, OGN, and AGTR1.

24. A complex comprising, consisting, or consisting essentially of at least one cDNA and at least one oligonucleotide primer or probe that hybridizes to the cDNA, wherein the at least one cDNA is a selected from ARNTL, CD1C, HHEX, KLRG1, MMP16, FGFR2, GATA2, CEACAM7, OGN, and AGTR1.

25. The composition of claim 23 or the complex of claim 24, comprising two or more cDNAs and at least one oligonucleotide primer or probe that hybridizes to an individual one of the cDNAs.

26. The composition or complex of claim 25, wherein the composition or complex comprises a population of cDNAs corresponding to mRNA derived from a cell or cell population.

27. The composition or complex of to claim 26, wherein the cell is a cell of a tumor.

28. The composition or complex of any one of claims 23 to 27, wherein the at least one oligonucleotide primer or probe is hybridized to an individual one of the cDNAs.

29. The composition or complex of any one of claims 23 to 28, wherein the composition or complex further comprises a labelled reagent for detecting the cDNAs.

30. The composition or complex according to claim 29, wherein the labelled reagent is a labelled said at least one oligonucleotide primer or probe.

31. The composition or complex of claim 30, wherein the labelled reagent is a labelled said cDNA.

32. A composition or complex of any one of claims 23 to 31, wherein the at least one oligonucleotide primer or probe is in a form other than a high density array.

33. A kit for determining an indicator indicative of the likelihood of hypoxia in a subject, the kit comprising, consisting, or consisting essentially of, (a) at least one reagent that allows quantification of a hypoxia biomarker, wherein the at least one hypoxia biomarker is selected from ARNTL, CD1C, HHEX, KLRG1, MMP16, FGFR2, GATA2, CEACAM7, OGN, and AGTR1; and optionally (b) instructions for using the at least one reagent.

34. A composition comprising, consisting, or consisting essentially of at least one (i.e., 2, 3, 4, 5, 6, 7, 8, 9, 10, or more than 10) cDNAs, and for each respective cDNA two oligonucleotide primers that hybridize to opposite complementary strands of the cDNA, and an oligonucleotide probe that hybridizes to the cDNA, wherein the at least one cDNA is a selected from ARNTL, CD1C, HHEX, KLRG1, MMP16, FGFR2, GATA2, CEACAM7, OGN, and AGTR1.

35. The composition of claim 34, wherein the composition further comprises a labelled reagent for detecting the cDNA.

36. The composition of claim 34, wherein the labelled reagent is a labelled said at least one oligonucleotide primer or probe.

The application's sequence listing, which the Patent Office published only in electronic form, follows.

SEQUENCE LISTING (367 sequences)

SEQ ID NO: 1 - DNA, 2863 bp, homo sapiens
gcgattggtgggcggggggccgggcctgggccggcggggagcggattggtcggaaagtaggttagtggtgcgacatttagggaaggcagaaagtaggtcagggacggaggtgcctgtttacccgcgccggactcaccgccgccgccgccgcgggatccgagtgcgggcgcgggcgcgggcgctcccggcgagccacggtggtgctggctagagtgtatacgtttggacccaagcttaacttttccaatgtggaatcctgggccttcattggttccgatgtcataggaatctacgctagagggcttcctgtgtgccgggcactgtggtttttggaagaagctgaccgcctgaaaagaaattataaaacatgaaaatcgctttgaggtgaccaagtccagaggcccctaactcctcccaagctggatctggggtgtaagaactgtgacttcagatcatccaatggcagaccagagaatggacatttcttcaaccatcagtgatttcatgtccccgggccccaccgacctgctttccagctctcttggtaccagtggtgtggattgcaaccgcaaacggaaaggcagctccactgactaccaagaaagcatggacacagacaaagatgaccctcatggaaggttagaatatacagaacaccaaggaaggataaaaaatgcaagggaagctcacagtcagattgaaaagcggcgtcgggataaaatgaacagttttatagatgaattggcttctttggtaccaacatgcaacgcaatgtccaggaaattagataaacttactgtgctaaggatggctgttcagcacatgaaaacattaagaggtgccaccaatccatacacagaagcaaactacaaaccaacttttctatcagacgatgaattgaaacacctcattctcagggcagcagatggatttttgtttgtcgtaggatgtgaccgagggaagatactctttgtctcagagtctgtcttcaagatcctcaactacagccagaatgatctgattggtcagagtttgtttgactacctgcatcctaaagatattgccaaagtcaaggagcagctctcctcctctgacaccgcaccccgggagcggctcatagatgcaaaaactggacttccagttaaaacagatataacccctgggccatctcgattatgttctggagcacgacgttctttcttctgtaggatgaagtgtaacaggccttcagtaaaggttgaagacaaggacttcccctctacctgctcaaagaaaaaagatcgaaaaagcttctgcacaatccacagcacaggctatttgaaaagctggccacccacaaagatggggctggatgaagacaacgaaccagacaatgaggggtgtaacctcagctgcctcgtcgcaattggacgactgcattctcatgtagttccacaaccagtgaacggggaaatcagggtgaaatctatggaatatgtttctcggcacgcgatagatggaaagtttgtttttgtagaccagagggcaacagctattttggcatatttaccacaagaacttctaggcacatcgtgttatgaatattttcaccaagatgacataggacatcttgcagaatgtcataggcaagttttacagacgagagaaaaaattacaactaattgctataaatttaaaatcaaagatggttcttttatcacactacggagtcgatggttcagtttcatgaacccttggaccaaggaagtagaatatattgtctcaactaacactgttgttttagccaacgtcctggaaggcggggacccaaccttcccacagctcacagcatccccccacagcatggacagcatgctgccctctggagaaggtggcccaaagaggacccaccccactgttccagggattccagggggaacccgggctggggcaggaaaaataggccgaatgattgctgaggaaatcatggaaatccacaggataagagggtcatcgccttctagctgtggctccagcccattgaacatcacgagtacgcctccccctgatgcctcttctccaggaggcaagaagattttaaatggagggactccagacattccttccagtggcctactatcaggccaggctcaggagaacccaggttatccatattctgatagttcttctattcttggtgagaacccccacataggtatagacatgattgacaacgaccaaggatcaagtagtcccagtaatgatgaggcagcaatggctgtcatcatgagcctcttggaagcagatgctggactgggtggccctgttgactttagtgacttgccatggccgctgtaaacactacatgttgctttggcaacagctatagtatcaaagtgcattactggtggagttttacagtctgtgaagcttactggataaggagagaatagcttttatgtactgacttcataaaagccatctcagagccattgatacaagtcaatcttactatatgtaacttcagacaaagtggaactaagcctgctccagtgtttcctcatcattgattattgggctagctgtggatagcttgcattaattgtatattttggattctgtttgtgttgaattttttaatcattgtgcacagaagcatcattggtagcttttatatgcaaatggtcatttcagatgtatggtgtttttacactacaaagaagtcccccatgtggatatttcttatactaattgtatcataaagccgtttattcttccttgtaagaatcctttactataaatatgggttaaagtataatgtactagacagttaaatatttttaataaatgtttcccttgttctataaaaaaaaaaaaaaaaaaa

SEQ ID NO: 2 - DNA, 2592 bp, homo sapiens
accactttgtctaaggcagttgaggaagggaagtagatataatggagcttagtggcagagcagctggaatcctgagagaagagaataactttagttcagagcaggtggggaaatgagagattgagtaggaggaccaaggttgagggaagcagatcttcttagttgctgtcagcggctgatggggaagattgttggtagaaggaagtcagaatataggtacagagggataagtttgctaagaacagagatcagcaaacagcttttctgagagaaagaaacatctgcaaatgacatgctgtttctgcagtttctgctgctagctcttcttctcccaggtggtgacaatgcagacgcatcccaggaacacgtctccttccatgtcatccagatcttctcatttgtcaaccaatcctgggcacgaggtcagggctcaggatggctggacgagttgcagactcatggctgggacagtgaatcaggcacaataattttcctgcataactggtccaagggcaacttcagcaatgaagagttgtcagacctagagttgttatttcgtttctacctctttggattaactcgggagattcaagaccatgcaagtcaagattactcgaaatatccctttgaagtacaggtgaaagcgggctgtgagctgcattctggaaagagcccagaaggcttctttcaggtagctttcaacggattagatttactgagtttccagaatacaacatgggtgccatctccaggctgtggaagtttggcccaaagtgtctgtcatctactcaatcatcagtatgaaggcgtcacagaaacagtgtataatctcataagaagcacttgcccccgatttctcttgggtctcctggatgcagggaagatgtatgtacacaggcaagtgaggccagaagcctggctgtccagtcgccccagccttgggtctggccagctgttgctggtttgtcatgcctccggcttctacccaaagcctgtttgggtgacatggatgcggaatgaacaggagcaactgggcactaaacatggtgatattcttcctaatgctgatgggacatggtatcttcaggtgatcctggaggtggcatctgaggagcctgctggcctgtcttgtcgagtgagacacagcagtctaggaggccaggacatcatcctctactggggacaccacttttccatgaattggattgccttggtagtgatagtgcccttggtgattctaatagtccttgtgttatggtttaagaagcactgctcatatcaggacatcctgtgagactcttccccctgactcccccattgtgttaagaacccagcaacccaggagcctagtacaatatagtgatgccatcccgtcgactctccatttaaattgtttctctttctgcataataaacatttgttaataaaaaccaaattctaatttggaatgtttttcttggaatctccactttttatatagcactcaaccttcaaagcccatttctgatgtcatttcctccaacgatcttccttgacccatactgaacccagagagcccctcaactgttatgtgcatgcaacacttcctaccctgtgttgcagctacttgagtctttcatttcacatttttaagcttttaggaggcaaggatcatgataaatgtgcctttcctgcatatgataggctcagtgaaacacaaaacaaaacatcatatctaagttggattaactgtcatgttgacaatttttctcattatattccttcccaatgttgttgtagcattggaaatattcatgcttctctttttgtttaaatgcttcatacctagcagataaattccactctcctttagctccctcattttctccttaaacatttaaggaaaagtgcagccttgtgccttgatacacttattttctaaacacagagaattacaaatgcaaatagacagagagtgtgcaagttacatgtgatgatcagtggtgcagatatgtcacagaatacttaagaaaaggaacaagagatttggtcctcagggttggagtgggatcaaggcaaccgttgtgctgtatatggaagacaaatttcctaaaggactgtgttatctgagatagccttggctaaactttagtccctttaggtttcattcactaattcaactaatattttttgggtactgagttgagacaggcacatacagcttctaaactggtggtggataaaacaaatgagattgtgtccactctcctgaagttgcaatgtttgcttcctcaatctgtccatgtttcttttctattgttttcatgtttttatttatttcaaaaaattttaaatagattttattgatgtataatttatagtaaaatttgaatctttaagtgtacagttctatttattttgataattatataagcccatgtaaacaaaatcacaatcaagatattaaatgtcataacccctcatacctgtttgtagtcaagcacaccaacaacctggcattcttgcaactactgatatactttatgtcacttaagcttaaacttgtattttctatgattttattaagatggaaataaacatatctacttggta

SEQ ID NO: 3 - DNA, 1772 bp, homo sapiens
ggataaatgtagcgccgcggcgcgggccagcagctctgcgaggggccggagcgcggcggagccatgcagtacccgcaccccgggccggcggcgggcgccgtgggggtgccgctgtacgcgcccacgccgctgctgcaacccgcacacccgacgcccttttacatcgaggacatcctgggccgcgggcccgccgcgcccacgcccgcccccacgctgccgtcccccaactcctccttcaccagcctcgtgtccccctaccggaccccggtgtacgagcccacgccgatccatccagccttctcgcaccactccgccgccgcgctggccgctgcctacggacccggcggcttcgggggccctctgtaccccttcccgcggacggtgaacgactacacgcacgccctgctccgccacgaccccctgggcaaacctctactctggagccccttcttgcagaggcctctgcataaaaggaaaggcggccaggtgagattctccaacgaccagaccatcgagctggagaagaaattcgagacgcagaaatatctctctccgcccgagaggaagcgtctggccaagatgctgcagctcagcgagagacaggtcaaaacctggtttcagaatcgacgcgctaaatggaggagactaaaacaggagaaccctcaaagcaataaaaaagaagaactggaaagtttggacagttcctgtgatcagaggcaagatttgcccagtgaacagaataaaggtgcttctttggatagctctcaatgttcgccctcccctgcctcccaggaagaccttgaatcagagatttcagaggattctgatcaggaagtggacattgagggcgataaaagctattttaatgctggatgatgaccactggcattggcatgttcagaaaactggatttaggaataatgttttgctacagaaaatcttcatagaagaactggaaggctatataagaaagggaatcaattctctggtattctggaaacctaaaaatatttggtgcactgctcaattaacaaacctacatggagaccttaattttgacttaacaaatagtttatgtactgctcttaggttgttttgataaagtgacattatagtgattaaattcttccccctttaaaaaaacagttagtggttttcactatttataaaaaattaattttgaactttttgttaaatttttaagttatagctttaaaggttttaataggaccttcttgaacgacttttctgtaatctgtttatctcccacttaatggaaaggcaaaggggtaccccaaatccagaggtgcctacatttcaggcagccttggagtattttaaaaggaaaacattctttacttttatatgacattcttatactgctgtctcaaatccaaaaacatttcagagctcttgtctcagagatgtgtgttctttttgtcagagatatggttgatgagaatcttaaatgcttgttttgcactatcacttagtacctgtttgaccaaggtgttaaggggatagtacctcccaattcaagcagagaaactgacctgactaaagttaatcgcagatgaactagaagtcacaggttaattaaatgtaagtagattgtagatactgttttatatcaaacaatgtttataatgtgtatatagaattgttcactgtaaaaaaaatggccaaaatgtgttttttttttaataagtaacttgactataaaataaagccgtccgtgggacgactgacctcgttgcaaaaaaaaaaaaaaa

SEQ ID NO: 4 - DNA, 1342 bp, homo sapiens
cttagctgaagatgactgacagtgttatttattccatgttagagttgcctacggcaacccaagcccagaatgactatggaccacagcaaaaatcttcctcttccaggccttcttgttcttgccttgtggcaatagctttggggcttctgactgcagttcttctgagtgtgctgctataccagtggatcctgtgccagggctccaactactccacttgtgccagctgtcctagctgcccagaccgctggatgaaatatggtaaccattgttattatttctcagtggaggaaaaggactggaattctagtctggaattctgcctagccagagactcacacctccttgtgataacggacaatcaggaaatgagcctgctccaagttttcctcagtgaggccttttgctggattggtctgaggaacaattctggctggaggtgggaagatggatcacctctaaacttctcaaggatttcttctaatagctttgtgcagacatgcggtgccatcaacaaaaatggtcttcaagcctcaagctgtgaagttcctttacactgggtgtgtaagaagtgtccctttgcagatcaagctttattctgaagaataaacctagctggcatgctggtgtgtacctgtagtcctagctatttgggaagctgaggtgggagggtcgcttgagcccaggagtttgaggctgcagtgagctatgattgtgccactgtactccagcctgggagatagagcaagactccatctctaaaaaaaaaaaaaaatgctaatgtgagaatataaattgtgggaaatgagtgagggcaaggtggtacttcctccttctgagctcttcacacgtaatgcaaaaacccggtcttaactgattttgttttttttctgagtatgcatatatgtggttgaatgaaccaatgtgtgattgtatcttttccattatgtgactgtttgacctgcatattaatttcaagatagcagtcaattcgataaggcattttcatagaggaaagtttacagaaacagtttatgtggttggatcaccaaattatcttaggtactaaggcctcaaaaataagaaaaactttattatttctcctcagtagagtttggacatacataaggagagaaggtacagtgatgaaggagaccataattctgtagtgttgatgatcctggattataatctttttctctttatctttcatagtttttttaaaaacatggactgtatcttatctaccactatatcccaaatacctaagatagtgcttacgttcagtgactattaaataaataaatggatgaattaaaaaaaaaaaaaaaaaaaaaaaaaaaaa

SEQ ID NO: 5 - DNA, 6347 bp, homo sapiens
tctttgagccggaaccgccggtgaacttaggcgccacgttcccggtgactgaccccggaggatggtgaacaggaactactgctgaccctgtcttcgccgctgcctctcgggggctgccgagcgcggggcccctgtctcctccccttgcccggctgtgggtgaacctgcaggctccttacccacccggaggacttttttttgaaaggaaacgagggagggagggagagggagagagggagaaaacgaaggggagctcgtccatccattgaagcacagttcactatgatcttactcacattcagcactggaagacggttggatttcgtgcatcattcgggggtgtttttcttgcaaaccttgctttggattttatgtgctacagtctgcggaacggagcagtatttcaatgtggaggtttggttacaaaagtacggctaccttccaccgactgaccccagaatgtcagtgctgcgctctgcagagaccatgcagtctgccctagctgccatgcagcagttctatggcattaacatgacaggaaaagtggacagaaacacaattgactggatgaagaagccccgatgcggtgtacctgaccagacaagaggtagctccaaatttcatattcgtcgaaagcgatatgcattgacaggacagaaatggcagcacaagcacatcacttacagtataaagaacgtaactccaaaagtaggagaccctgagactcgtaaagctattcgccgtgcctttgatgtgtggcagaatgtaactcctctgacatttgaagaagttccctacagtgaattagaaaatggcaaacgtgatgtggatataaccattatttttgcatctggtttccatggggacagctctccctttgatggagagggaggatttttggcacatgcctacttccctggaccaggaattggaggagatacccattttgactcagatgagccatggacactaggaaatcctaatcatgatggaaatgacttatttcttgtagcagtccatgaactgggacatgctctgggattggagcattccaatgaccccactgccatcatggctccattttaccagtacatggaaacagacaacttcaaactacctaatgatgatttacagggcatccagaagatatatggtccacctgacaagattcctccacctacaagacctctaccgacagtgcccccacaccgctctattcctccggctgacccaaggaaaaatgacaggccaaaacctcctcggcctccaaccggcagaccctcctatcccggagccaaacccaacatctgtgatgggaactttaacactctagctattcttcgtcgtgagatgtttgttttcaaggaccagtggttttggcgagtgagaaacaacagggtgatggatggatacccaatgcaaattacttacttctggcggggcttgcctcctagtatcgatgcagtttatgaaaatagcgacgggaattttgtgttctttaaaggtaacaaatattgggtgttcaaggatacaactcttcaacctggttaccctcatgacttgataacccttggaagtggaattccccctcatggtattgattcagccatttggtgggaggacgtcgggaaaacctatttcttcaagggagacagatattggagatatagtgaagaaatgaaaacaatggaccctggctatcccaagccaatcacagtctggaaagggatccctgaatctcctcagggagcatttgtacacaaagaaaatggctttacgtatttctacaaaggaaaggagtattggaaattcaacaaccagatactcaaggtagaacctggatatccaagatccatcctcaaggattttatgggctgtgatggaccaacagacagagttaaagaaggacacagcccaccagatgatgtagacattgtcatcaaactggacaacacagccagcactgtgaaagccatagctattgtcattccctgcatcttggccttatgcctccttgtattggtttacactgtgttccagttcaagaggaaaggaacaccccgccacatactgtactgtaaacgctctatgcaagagtgggtgtgatgtagggttttttcttctttctttcttttgcaggagtttgtggtaacttgagattcaagacaagagctgttatgctgtttcctagctaggagcaggcttgtggcagcctgattcggggctgacctttcaaacccagagggttgctggtcctgcacatgagtggaaatacactcatggggaagcttccatgatgcacagtatctgctgttcttcagtcctttgtctttctttgtcattcagttctaggcctttcctctgcacgctcaatgcccagtaaaatttcaggattaactaaagaagaggagaaaaagaagaaaagattcttcttaaaagtttctaatgttattttccttctgaagtctgagcccatttctggggggagaaaaaaaaagcaaatcagaaaacccacggtttttctttttttctttttttctttttttctttttttgctttaaaacaaagggaaaaaagagtttaaacaaaaaacccacaattgaacttccaggaaagtgtgaagacccaaaacagctttgtctccaaagaagatagctctctgactgctttggatagtctcctacgcaccattttgtcaggtgggagatttggaatacacatgcaggacgttagactgttgggacagccattttccaacaaccaaggggccaaaatatctgcaatatagtaacagccttaataatacatccatttttcgttttatacagctgttctcagctatgtcctcagtgtttcatcgcatttatattcatagctattttcaaacacgaccttttaattgtttttgaagtatttctaaaccccttctttccaccttactcctccatcattgtgataatcttcccaagttgtattaggccattgccccaggccttccatgggtctgtcaggaatattcgttacaaagcagagcaagaagcagtatgtctctgaagtggattacagtggcagttattttacaaggatttgtgacactagtaacatacccgtgtaaccctttgagaactatcagaccagctttcagagtcttaggattgtcggtcttgcgatctgataaattatagaactgggcaatggtaaaaacagtcacaagttcaagaagttcaggtttttaaaacagatatcctataatgtcatataatttttaaatgatttacaagactacataaatgtgtttataacaaacagaaatgatgttacttgccaaaatttttctggcaaataaaaaaggtattttattaagattctcataaatctgaaattttatttgaaaaactgataatagcctaagtcttcttttcttttttttaggcatactgaatttctgttttaaaatccattgcatgaaaattcaatttgccttggtatatgcagttagcattgccattttaaaaatgaattaaaacggtgactctgaagttgcatgaatatcctccagtgcattacctattgcatgtccaccatagttctcaaagggttagtgtggcttctggcatttagccgtccatttgatcactgacagagccaagagaccaccaaagcatttcattgttgagtgtaatttgtcctaacagcagtattgtcattttcatgtgacctgcagagcaggtttgtatcaatatttttttcctagagaaaagtcagcaactgacagacctctttattgatttttaggagctgcttcttgcagtgaaaggctttacagccactgggctgtgaacttattagagatggtcagaatgaatgcaccccatgagtcagacattggctttgtgtgaaagccagctttgaggggattagcttttgaaacaatgaacagcttgccttgaacttgattattgatctattgactgtcattaacaacaacttaaacattgtcttctgtgaaaattttccttgaagagtcctgttctatgtctttgccctttgacctttaacttgcaaactggcacaaactgaaggaaatctggtgttgcttctccattggattagttgttctctaaaacctagtaagcatgagctgtttccttagagtggagagagtggtgatggcagatctgcagatggacactttgctctttacatgcacactctgaaaatgccctataggtagaagtgaattttaatttcattttaatataatttcaagtctaaattcatcattttagtacaaattacaaaaactataggaaaaaaaaaacctcaaatacttgaatggccagtgtggcttttatataaagcaggaattttatactagtaaaaatttcttactcatttgctaatacacatttccagatgatttttaatgagtgtaggtatacattcttatttggaaatggatagtttggctgccttgaatttatatttatactcaacgtagcatgaaaattagaatgccttttggttaaactacatgtttatgatttggttggggaaaatattttataattgtgggtggcatgctgcaaagccttgcagattgttatttcttacaacctgagcgtatatagtatgagcctaagaaaaaagaagagtaagaaaagaagaatggctttacagtaaaatatcatacaatgcagacaatattttaagaggatattggagattatgtacgcaagggccaagaaagcaagaaatgagaaccagagtcagccctgtagctttacttcagtgcttccattctagatgatgctgatattataaagagttagtcactgctgctaagcatggaggactatatacataagctcgtttatacagtgtttgcttgtgggagggtttaatccttttagggccttgatgtcaagaaaaaaataactggaaactatattttgctaaagatagaaatgaggaactgtgtcattttgggacatgtgcaaatcattgaggaactccatcaccctgcattgaaaattgatttttttttcctctaaaatgagaaagaaactgaataagcaatctgttgcctctttactcattcatcacaatatcctgattcgtcataaggctatcagtatataagggctagaaaataatcatagcattaagaaggaaggagtctatcattatgcttgaattctggcaaatgtcatgaataagggttgggtcatatttactttaatatgagacaagatttatgtgataagcaaaggcatataaggctgctcttttgaacagaacatttcagttatcaggctgtactattacaagagataagaagacaataaggacaatgtaatcacaaacagtgggattccatttgtttattgtacaccagctactttgtgggtatggttcctgactcctcttctacatgaggtttgggaaaaaagtctcaaaccaaatggaacagtgaaagggaaagtaattcatctagcacataagaatagtgattcaaaaccaatgcagaataaatttccatgggtcaataacataaggtgtcagttcagtgttactagagatatgcaaggcataaaatattttcatcaccccatcactaataacatgaaaagctcagacataggatttcccaaattgaaatgaaaacacattcatgcctgcaaaaataattctccttctgcttcatttctcattactttatctaatataaacacaaatgtaaacaaggtaatggtcttcatgtaaaatgaccatatagttaagaattttagtaaaatattgttgttctgtgtattattaaacaaatgcaatgaagtattaaaatagctgatcagtttgaatttcctgtaaagcagtaattccgcatcagaattgtagataaggttgtgaatttattgactcatttcagaacagtgtctgttgacatggcagtcagagcaggtgaatacagatgctctttctgattgcaaaggttatagagctaaattagacagcattatgtgatactagcaaagacaacttctgttataaatcagagggcaaggcttttctgaatcgatgtgataaattactaagtaatgattaccaaaaataattactaagtaataaaagatacagactggtttactgaaataagcaagtgttacatttaataattacctataatctttttttgttaacacataagcaagtgttacctttaataattacctataatctttttttgttaacacataatttggccatttcatatactgtgtacctattttcattccctctctgtgggtcattaaaaaacacaatgtggtggataaaaaaaaaaaaaa

SEQ ID NO: 6 - DNA, 4654 bp, homo sapiens
ggcggcggctggaggagagcgcggtggagagccgagcgggcgggcggcgggtgcggagcgggcgagggagcgcgcgcggccgccacaaagctcgggcgccgcggggctgcatgcggcgtacctggcccggcgcggcgactgctctccgggctggcgggggccggccgcgagccccgggggccccgaggccgcagcttgcctgcgcgctctgagccttcgcaactcgcgagcaaagtttggtggaggcaacgccaagcctgagtcctttcttcctctcgttccccaaatccgagggcagcccgcgggcgtcatgcccgcgctcctccgcagcctggggtacgcgtgaagcccgggaggcttggcgccggcgaagacccaaggaccactcttctgcgtttggagttgctccccgcaaccccgggctcgtcgctttctccatcccgacccacgcggggcgcggggacaacacaggtcgcggaggagcgttgccattcaagtgactgcagcagcagcggcagcgcctcggttcctgagcccaccgcaggctgaaggcattgcgcgtagtccatgcccgtagaggaagtgtgcagatgggattaacgtccacatggagatatggaagaggaccggggattggtaccgtaaccatggtcagctggggtcgtttcatctgcctggtcgtggtcaccatggcaaccttgtccctggcccggccctccttcagtttagttgaggataccacattagagccagaagagccaccaaccaaataccaaatctctcaaccagaagtgtacgtggctgcgccaggggagtcgctagaggtgcgctgcctgttgaaagatgccgccgtgatcagttggactaaggatggggtgcacttggggcccaacaataggacagtgcttattggggagtacttgcagataaagggcgccacgcctagagactccggcctctatgcttgtactgccagtaggactgtagacagtgaaacttggtacttcatggtgaatgtcacagatgccatctcatccggagatgatgaggatgacaccgatggtgcggaagattttgtcagtgagaacagtaacaacaagagagcaccatactggaccaacacagaaaagatggaaaagcggctccatgctgtgcctgcggccaacactgtcaagtttcgctgcccagccggggggaacccaatgccaaccatgcggtggctgaaaaacgggaaggagtttaagcaggagcatcgcattggaggctacaaggtacgaaaccagcactggagcctcattatggaaagtgtggtcccatctgacaagggaaattatacctgtgtagtggagaatgaatacgggtccatcaatcacacgtaccacctggatgttgtggagcgatcgcctcaccggcccatcctccaagccggactgccggcaaatgcctccacagtggtcggaggagacgtagagtttgtctgcaaggtttacagtgatgcccagccccacatccagtggatcaagcacgtggaaaagaacggcagtaaatacgggcccgacgggctgccctacctcaaggttctcaaggccgccggtgttaacaccacggacaaagagattgaggttctctatattcggaatgtaacttttgaggacgctggggaatatacgtgcttggcgggtaattctattgggatatcctttcactctgcatggttgacagttctgccagcgcctggaagagaaaaggagattacagcttccccagactacctggagatagccatttactgcataggggtcttcttaatcgcctgtatggtggtaacagtcatcctgtgccgaatgaagaacacgaccaagaagccagacttcagcagccagccggctgtgcacaagctgaccaaacgtatccccctgcggagacaggtaacagtttcggctgagtccagctcctccatgaactccaacaccccgctggtgaggataacaacacgcctctcttcaacggcagacacccccatgctggcaggggtctccgagtatgaacttccagaggacccaaaatgggagtttccaagagataagctgacactgggcaagcccctgggagaaggttgctttgggcaagtggtcatggcggaagcagtgggaattgacaaagacaagcccaaggaggcggtcaccgtggccgtgaagatgttgaaagatgatgccacagagaaagacctttctgatctggtgtcagagatggagatgatgaagatgattgggaaacacaagaatatcataaatcttcttggagcctgcacacaggatgggcctctctatgtcatagttgagtatgcctctaaaggcaacctccgagaatacctccgagcccggaggccacccgggatggagtactcctatgacattaaccgtgttcctgaggagcagatgaccttcaaggacttggtgtcatgcacctaccagctggccagaggcatggagtacttggcttcccaaaaatgtattcatcgagatttagcagccagaaatgttttggtaacagaaaacaatgtgatgaaaatagcagactttggactcgccagagatatcaacaatatagactattacaaaaagaccaccaatgggcggcttccagtcaagtggatggctccagaagccctgtttgatagagtatacactcatcagagtgatgtctggtccttcggggtgttaatgtgggagatcttcactttagggggctcgccctacccagggattcccgtggaggaactttttaagctgctgaaggaaggacacagaatggataagccagccaactgcaccaacgaactgtacatgatgatgagggactgttggcatgcagtgccctcccagagaccaacgttcaagcagttggtagaagacttggatcgaattctcactctcacaaccaatgaggaatacttggacctcagccaacctctcgaacagtattcacctagttaccctgacacaagaagttcttgttcttcaggagatgattctgttttttctccagaccccatgccttacgaaccatgccttcctcagtatccacacataaacggcagtgttaaaacatgaatgactgtgtctgcctgtccccaaacaggacagcactgggaacctagctacactgagcagggagaccatgcctcccagagcttgttgtctccacttgtatatatggatcagaggagtaaataattggaaaagtaatcagcatatgtgtaaagatttatacagttgaaaacttgtaatcttccccaggaggagaagaaggtttctggagcagtggactgccacaagccaccatgtaacccctctcacctgccgtgcgtactggctgtggaccagtaggactcaaggtggacgtgcgttctgccttccttgttaattttgtaataattggagaagatttatgtcagcacacacttacagagcacaaatgcagtatataggtgctggatgtatgtaaatatattcaaattatgtataaatatatattatatatttacaaggagttattttttgtattgattttaaatggatgtcccaatgcacctagaaaattggtctctctttttttaatagctatttgctaaatgctgttcttacacataatttcttaattttcaccgagcagaggtggaaaaatacttttgctttcagggaaaatggtataacgttaatttattaataaattggtaatatacaaaacaattaatcatttatagttttttttgtaatttaagtggcatttctatgcaggcagcacagcagactagttaatctattgcttggacttaactagttatcagatcctttgaaaagagaatatttacaatatatgactaatttggggaaaatgaagttttgatttatttgtgtttaaatgctgctgtcagacgattgttcttagacctcctaaatgccccatattaaaagaactcattcataggaaggtgtttcattttggtgtgcaaccctgtcattacgtcaacgcaacgtctaactggacttcccaagataaatggtaccagcgtcctcttaaaagatgccttaatccattccttgaggacagaccttagttgaaatgatagcagaatgtgcttctctctggcagctggccttctgcttctgagttgcacattaatcagattagcctgtattctcttcagtgaattttgataatggcttccagactctttggcgttggagacgcctgttaggatcttcaagtcccatcatagaaaattgaaacacagagttgttctgctgatagttttggggatacgtccatctttttaagggattgctttcatctaattctggcaggacctcaccaaaagatccagcctcatacctacatcagacaaaatatcgccgttgttccttctgtactaaagtattgtgttttgctttggaaacacccactcactttgcaatagccgtgcaagatgaatgcagattacactgatcttatgtgttacaaaattggagaaagtatttaataaaacctgttaatttttatactgacaataaaaatgtttctacagatattaatgttaacaagacaaaataaatgtcacgcaacttatttttttaataaaaaaaaaaaaaaa

SEQ ID NO: 7 - DNA, 3484 bp, homo sapiens
actgggtcaagcacagccctgagcggccgcgtgtccgaggcccaggtgccctctagagccctgtagttcctgcccctctctgcccctctcggctcctgctgttccgccgctgtcgtccgaaccatcccaacccccagtccacccagacagcgcccgagctaggggagggaacggtctgggagtcggcagctggcgccagggcggccggaggatgccgaggggccggagccgggagggcccgaggccgaggcgcactctacccccagctcctaccctgtaagccccgccagcctccggacgtgctgtccctgggcccgtcgccctcggggctcccgccggaactccttcactctcagaggccgagtccctcccctccccacggctgcgtgtggccgttgccgtctgcacccagaccctgagccgccgccgccggccatggaggtggcgcccgagcagccgcgctggatggcgcacccggccgtgctgaatgcgcagcaccccgactcacaccacccgggcctggcgcacaactacatggaacccgcgcagctgctgcctccagacgaggtggacgtcttcttcaatcacctcgactcgcagggcaacccctactatgccaaccccgctcacgcgcgggcgcgcgtctcctacagccccgcgcacgcccgcctgaccggaggccagatgtgccgcccacacttgttgcacagcccgggtttgccctggctggacgggggcaaagcagccctctctgccgctgcggcccaccaccacaacccctggaccgtgagccccttctccaagacgccactgcacccctcagctgctggaggccctggaggcccactctctgtgtacccaggggctgggggtgggagcgggggaggcagcgggagctcagtggcctccctcacccctacagcagcccactctggctcccaccttttcggcttcccacccacgccacccaaagaagtgtctcctgaccctagcaccacgggggctgcgtctccagcctcatcttccgcggggggtagtgcagcccgaggagaggacaaggacggcgtcaagtaccaggtgtcactgacggagagcatgaagatggaaagtggcagtcccctgcgcccaggcctagctactatgggcacccagcctgctacacaccaccccatccccacctacccctcctatgtgccggcggctgcccacgactacagcagcggactcttccaccccggaggcttcctggggggaccggcctccagcttcacccctaagcagcgcagcaaggctcgttcctgttcagaaggccgggagtgtgtcaactgtggggccacagccacccctctctggcggcgggacggcaccggccactacctgtgcaatgcctgtggcctctaccacaagatgaatgggcagaaccgaccactcatcaagcccaagcgaagactgtcggccgccagaagagccggcacctgttgtgcaaattgtcagacgacaaccaccaccttatggcgccgaaacgccaacggggaccctgtctgcaacgcctgtggcctctactacaagctgcacaatgttaacaggccactgaccatgaagaaggaagggatccagactcggaaccggaagatgtccaacaagtccaagaagagcaagaaaggggcggagtgcttcgaggagctgtcaaagtgcatgcaggagaagtcatcccccttcagtgcagctgccctggctggacacatggcacctgtgggccacctcccgcccttcagccactccggacacatcctgcccactccgacgcccatccacccctcctccagcctctccttcggccacccccacccgtccagcatggtgaccgccatgggctagggaacagatggacgtcgaggaccgggcactcccgggatgggtggaccaaacccttagcagcccagcatttcccgaaggccgacaccactcctgccagcccggctcggcccagcaccccctctcctggagggcgcccagcagcctgccagcagttactgtgaatgttccccaccgctgagaggctgcctccgcacctgaccgctgcccaggtggggtttcctgcatggacagttgtttggagaacaacaaggacaactttatgtagagaaaaggaggggacgggacagacgaaggcaaccatttttagaaggaaaaaggattaggcaaaaataatttattttgctcttgtttctaacaaggacttggagacttggtggtctgagctgtcccaagtcctccggttcttcctcgggattggcgggtccacttgccagggctctgggggcagatttgtggggacctcagcctgcaccctcttctcctctggcttccctctctgaaatagccgaactccaggctgggctgagccaaagccagagtggccacggcccagggagggtgagctggtgcctgctttgacgggccaggccctggagggcagagacaatcacgggcggtcctgcacagattcccaggccagggctgggtcacaggaaggaaacaacattttcttgaaaggggaaacgtctcccagatcgctcccttggctttgaggccgaagctgctgtgactgtgtccccttactgagcgcaagccacagcctgtcttgtcaggtggaccctgtaaatacatcctttttctgctaacccttcaaccccctcgcctcctactctgagacaaaagaaaaaatattaaaaaaatgcataggcttaactcgctgatgagttaattgttttatttttaaactctttttgggtccagttgattgtacgtagccacaggagccctgctatgaaaggaataaaacctacacacaaggttggagctttgcaattctttttggaaaagagctgggatcccacagccctagtatgaaagctgggggtggggaggggcctttgctgcccttggtttctgggggctggttggcatttgctggcctggcagggggtgaaggcaggagttgggggcaggtcaggaccaggacccagggagaggctgtgtccctgctggggtctcaggtccagctttactgtggctgtctggatccttcccaaggtacagctgtatataaacgtgtcccgagcttagattctgtatgcggtgacggcggggtgtggtggcctgtgaggggcccctggcccaggaggaggattgtgctgatgtagtgaccaagtgcaatatgggcgggcagtcgctgcagggagcaccacggccagaagtaacttattttgtactagtgtccgcataagaaaaagaatcggcagtattttctgtttttatgttttatttggcttgttttattttggattagtgaactaagttattgttaattatgtacaacatttatatattgtctgtaaaaaatgtatgctatcctcttattcctttaaagtgagtactgttaagaataataaaatactttttgtgaatgcccaaaaaaaaa

SEQ ID NO: 8 - DNA, 2399 bp, homo sapiens
gctcagcacagaggtaggaaggacagcagagctgacagtcacagcagccctgacaagagagttcctggagcccaagctcttctccacagaggacaagcaggcagcagagaccatggggtccccttcagcctgtccatacagagtgtgcattccctggcaggggctcctgctcacagcctcgcttttaaccttctggaacctgccaaacagtgcccagaccaatattgatgtcgtgccgttcaatgtcgcagaagggaaggaggtccttctagtagtccataatgagtcccagaatctttatggctacaactggtacaaaggggaaagggtgcatgccaactatcgaattataggatatgtaaaaaatataagtcaagaaaatgccccagggcccgcacacaacggtcgagagacaatataccccaatggaaccctgctgatccagaacgtcacccacaatgacgcaggaatctataccctacacgttataaaagaaaatcttgtgaatgaagaagtaaccagacaattctacgtattctcggagccacccaagccctccatcaccagcaacaacttcaatccggtggagaacaaagatattgtggttttaacctgtcaacctgagactcagaacacaacctacctgtggtgggtaaacaatcagagcctcctggtcagtcccaggctgctgctctccactgacaacaggaccctcgttctactcagcgccacaaagaatgacataggaccctatgaatgtgaaatacagaacccagtgggtgccagccgcagtgacccagtcaccctgaatgtccgctatgagtcagtacaagcaagttcacctgacctctcagctgggaccgctgtcagcatcatgattggagtactggctgggatggctctgatatagcagccttggtgtagtttctgcatttcgggaagagtgtttttattatccacctgcagactggactggattcttctagctccttcaatcccattttctcctgtggcatcactaagtataagacctgctctcttcctgaagacctataagctggaggtggacaactcaatgtaaatttcaaggaaaaaccctcatgcctgagatgtgggccactcagagctaaccaaaatgttcaacaccataactagagacactcaaattgccaaccaggacaagaagttgatgacttcatgctgtggacagtttttcccaagatgtcccaagcctcatcgtgacgaggctcttatcccactccatttttccctgctcatgcctgcctctttaatttggtaagataatgctgtaactagaatttcacaatcagcgccttgtgcaggtaatttgacagagtgttggatgtgtcatgtcatcatgtcaaacccaaatatttgacctaagggatcctttattctgcccagtggctaactttaacaacatccctaatacaactgtttattcaaatgcacggtggtccctgttagagttagacctctagactcacctgttctcacgccctgttttaatttaacccagctatgggatgccagataacagaattgctgcctactagctgaacagggaggagtttgtgcagttgctgacacttcttgttgcacataaataaatacagtgggtactatagagactcagttgcaaaaattaacaaatatgctgcttgattaaaatgggtaggcttctcatgtggctcattctttaatctattctcttttatttggtttggttcatggggtctctgcctatggatcatacttcaaactcttggtgtgatcctcctgattgtcacaatattagttaccctggtgtgctgtattctctaaaacctttaaatgtttgcatgcagccattcgtcaaatgtcaaatattctctctttggctggaatgacaaaaactcaaataaatgtatgattaggaggacatcataacctatgaatgatggaagtccaaaatgatggtaactgacagtagtgttaatgccttatgtttagtcaaactctcatttaggtgacagcctggtgactccagaatggagccagtcatgctaaatgccatatactcacactgaaacatgaggaagcaggtagatcccagaacagacaaaattttcctaaaaacatgagagtccaggctgtctgagtcagcacagtaagaaagtcctttctgctttaactcttagaaaaaagtaatatgaagtattctgaaattaaccaatcagtttatttaaatcaatttatttatattcttctgttcctggattcccattttacaaaacccactgttctactgttgtattgcccagtaggagctatcactatattttgcagaatggaaactgccctgactcatgaatcacaaataaaagccaattgtatct

SEQ ID NO: 9 - DNA, 3536 bp, homo sapiens
actgcatttcaccctagagaaagaatgctggcaaagatctctaccacatggaaactgttcttaaagctgctgggccctgaaattttactcagcagtttgaaatcaagacatagcttttctcattcaccctcccacttggggctaatgcacagacatgaacatctattgaggaaaaccacaaaaaacttcaaaacagctacaacgggaaaaagagagttttgtcccacagtcagcaggccactagtttattaacttccagtcaccttgatttttgctaaaatgaagactctgcagtctacacttctcctgttactgcttgtgcctctgataaagccagcaccaccaacccagcaggactcacgcattatctatgattatggaacagataattttgaagaatccatatttagccaagattatgaggataaatacctggatggaaaaaatattaaggaaaaagaaactgtgataatacccaatgagaaaagtcttcaattacaaaaagatgaggcaataacaccattacctcccaagaaagaaaatgatgaaatgcccacgtgtctgctgtgtgtttgtttaagtggctctgtatactgtgaagaagttgacattgatgctgtaccacccttaccaaaggaatcagcctatctttacgcacgattcaacaaaattaaaaagctgactgccaaagattttgcagacatacctaacttaagaagactcgattttacaggaaatttgatagaagatatagaagatggtactttttcaaaactttctctgttagaagaactttcacttgctgaaaatcaactactaaaacttccagttcttcctcccaagctcactttatttaatgcaaaatacaacaaaatcaagagtaggggaatcaaagcaaatgcattcaaaaaactgaataacctcaccttcctctacttggaccataatgccctggaatccgtgcctcttaatttaccagaaagtctacgtgtaattcatcttcagttcaacaacatagcttcaattacagatgacacattctgcaaggctaatgacaccagttacatccgggaccgcattgaagagatacgcctggagggcaatccaatcgtcctgggaaagcatccaaacagttttatttgcttaaaaagattaccgatagggtcatacttttaacctctattggtacaacatataaatgaaagtacacctacactaatagtctgtctcaacaatgagtaaaggaacttaagtattggtttaatattaaccttgtatctcattttgaaggaatttaatattttaagcaaggatgttcaaaatcttacatataataagtaaaaagtaagactgaatgtctacgttcgaaacaaagtaatatgaaaatatttaaacagcattacaaaatcctagtttatactagactaccatttaaaaatcatgtttttatataaatgcccaaatttgagatgcattattcctattactaatgatgtaagtacgaggataaatccaagaaactttcaactctttgcctttcctggcctttactggatcccaaaagcatttaaggtacatgttccaaaaactttgaaaagctaaatgtttcccatgatcgctcattcttcttttatgattcatacgttattccttataaagtaagaactttgttttcctcctatcaaggcagctattttattaaatttttcacttagtctgagaaatagcagatagtctcatatttaggaaaactttccaaataaaataaatgttattctctgataaagagctaatacagaaatgttcaagttattttactttctggtaatgtcttcagtaaaatattttctttatctaaatattaacattctaagtctaccaaaaaaagttttaaactcaagcaggccaaaaccaatatgcttataagaaataatgaaaagttcatccatttctgataaagttctctatggcaaagtctttcaaatacgagataactgcaaaatattttccttttatactacagaaatgagaatctcatcaataaattagttcaagcataagatgaaaacagaatattctgtggtgccagtgcacactaccttcccacccatacacatccatgttcactgtaacaaactgaatattcacaataaagcttctgagtaacactttctgattactcatgataaactgacatggctaactgcaagaattaaatcttctatctgagagtaataatttatgatgactcagtggtgccagagtaaagtttctaaaataacattcctctcacttgtaccccactaaaagtattagactacacattacattgaagttaaacacaaaattatcagtgttttagaaacatgagtccggactgtgtaagtaaaagtacaaacattatttccaccataaagtatgtattgaaatcaagttgtctctgtgtacagaatacatacttattcccatttttaagcatttgcttctgttttccctacctagaatgtcagatgtttttcagttatctccccatttgtcaaagttgacctcaagataacatttttcattaaagcatctgagatctaagaacacaattattattctaacaatgattattagctcattcacttattttgataactaatgatcacagctattatactactttctcgttattttgtgtgcatgcctcatttccctgacttaaacctcactgagagcgcaaaatgcagctttatactttttactttcaattgcctagcacaatagtgagtacatttgaattgaatatataataaatattgcaaaataaaatccatctaaatagaagggttctgttttatttggaaaaattgaatctttaaactatcataatcttgaatgactgtcatctttctagttttcagaaaaataatgtattcctatattatttttatgataaaacttatggagcaaaacaccatcaaataactctcaaattaagaaaaaattcaaaagtcagtagttttagataagataatgataagggagaaagaacattggtaaaaggtatgaattccagaattaaagaaataatttggggatttctagataagaggatatatatgaacatgcataccttacaccttcatatacacaaccttaaatcacaaataaaacaaaataaacaatacaaattataccaccaagattcagaagatatcagacgaaataattagagaaagtaaaaatatgctgtctccattatattcataatgtttcattcttgacactaataattagaggctttaaatttttaaatgatttactttttactaacattgctgaaaaaaactaaagacatacataaatggaaagatgtcttgtgtttatggatggtaagatttaatgttgttaagacaacaatactatccaatatgatatgcagactgaacacagttgccatcaaaatctcaatgatgctttcacacaaataaaatggaacttcaagagacccccaaataaagagaagaatcttgaaaataaaaaaaaaaaaa

SEQ ID NO: 10 - DNA, 2362 bp, homo sapiens
actataaattcggagctgcctcctcgccaatgattccagcgcctgacagccaggaccccaggcagcagcgagtgacaggacgtctggaccggcgcgccgctagcagctctgccgggccgcggcggtgatcgatggggagcggctggagcggacccagcgagtgagggcgcacagccgggacgccgaggcggcgggcgggagacccgcaccagcgcagccggccctcggcgggacgtgacgcagcgcccggggcgcgggtttgatatttgacaaattgatctaaaatggctgggtttttatctgaataactcactgatgccatcccagaaagtcggcaccaggtgtatttgatatagtgtttgcaacaaattcgacccaggtgatcaaaatgattctcaactcttctactgaagatggtattaaaagaatccaagatgattgtcccaaagctggaaggcataattacatatttgtcatgattcctactttatacagtatcatctttgtggtgggaatatttggaaacagcttggtggtgatagtcatttacttttatatgaagctgaagactgtggccagtgtttttcttttgaatttagcactggctgacttatgctttttactgactttgccactatgggctgtctacacagctatggaataccgctggccctttggcaattacctatgtaagattgcttcagccagcgtcagtttcaacctgtacgctagtgtgtttctactcacgtgtctcagcattgatcgatacctggctattgttcacccaatgaagtcccgccttcgacgcacaatgcttgtagccaaagtcacctgcatcatcatttggctgctggcaggcttggccagtttgccagctataatccatcgaaatgtatttttcattgagaacaccaatattacagtttgtgctttccattatgagtcccaaaattcaaccctcccgatagggctgggcctgaccaaaaatatactgggtttcctgtttccttttctgatcattcttacaagttatactcttatttggaaggccctaaagaaggcttatgaaattcagaagaacaaaccaagaaatgatgatatttttaagataattatggcaattgtgcttttctttttcttttcctggattccccaccaaatattcacttttctggatgtattgattcaactaggcatcatacgtgactgtagaattgcagatattgtggacacggccatgcctatcaccatttgtatagcttattttaacaattgcctgaatcctcttttttatggctttctggggaaaaaatttaaaagatattttctccagcttctaaaatatattcccccaaaagccaaatcccactcaaacctttcaacaaaaatgagcacgctttcctaccgcccctcagataatgtaagctcatccaccaagaagcctgcaccatgttttgaggttgagtgacatgttcgaaacctgtccataaagtaattttgtgaaagaaggagcaagagaacattcctctgcagcacttcactaccaaatgagcattagctacttttcagaattgaaggagaaaatgcattatgtggactgaaccgacttttctaaagctctgaacaaaagcttttctttccttttgcaacaagacaaagcaaagccacattttgcattagacagatgacggctgctcgaagaacaatgtcagaaactcgatgaatgtgttgatttgagaaattttactgacagaaatgcaatctccctagcctgcttttgtcctgttattttttatttccacataaaggtatttagaatatattaaatcgttagaggagcaacaggagatgagagttccagattgttctgtccagtttccaaagggcagtaaagttttcgtgccggttttcagctattagcaactgtgctacacttgcacctggtactgcacattttgtacaaagatatgctaagcagtagtcgtcaagttgcagatctttttgtgaaattcaacctgtgtcttataggtttacactgccaaaacaatgcccgtaagatggcttatttgtataatggtgttactaaagtcacatataaaagttaaactacttgtaaaggtgctgcactggtcccaagtagtagtgtcttcctagtatattagtttgatttaatatctgagaagtgtatatagtttgtggtaaaaagattatatatcataaagtatgccttcctgtttaaaaaaagtatatattctacacatatatgtatatgtatatctatatctctaaactgctgttaattgattaaaatctggcaaagttatatttactttaaaataaaataattttattgcaaaaaaaa

SEQ ID NO: 11 - DNA, 2141 bp, homo sapiens
gccgacgcgtgcagacgtccttctaatcctagtcttcgtttggtccggttgcactcttcctatagcccagagggcgagagggcctgtggcctgggggaaggaggacgaggttctgcctggatcccagcagtaggacgctgtgccatttgggaacaaaggaatagtctgcctggaatccctgcagatcttggggccggaggccagtccaacccttggagcaggaagaaacgcaaagttgtcaagaaccaagtcgagctgcctcagagccggcccgcagtagctgcagactccgcccgcgacgtgtgcgcgcttctctgggccagagcgagcctgttttgtgctcgggttaagagatttgtcccagctataccatgggccgcactcgggaagctggctgcgtggccgctggtgtggttatcggggctggtgcctgctactgtgtatacagactggcttggggaagagacgagaacgagaaaatctgggacgaagacgaggagtctacggacacctcagagattggggttgagactgtgaaaggagctaaaactaacgctggggcagggtctggggccaaacttcagggtgattcagaggtcaagcctgaggtgagtttgggactcgaggattgtccgggtgtaaaagagaaggcccattcaggatcccacagcggaggtggcctagaggccaaggccaaggcccttttcaacacgctgaaggaacaggcaagtgcaaaggcaggcaaaggggctagggtgggtaccatctctgggaacaggacccttgcaccgagtttaccctgcccaggaggcaggggtggaggctgccaccccaccaggagtggatctagggccgggggcagggcaagtggaaaatccaagggaaaggcccgaagtaagagcaccagggctccagctacaacatggcctgtccggagaggcaagttcaactttccttataaaattgatgatattctgagtgctcccgacctccaaaaggtcctcaacatcctggagcgaacaaatgatccttttattcaagaagtagccttggtcactctgggtaacaatgcagcatattcatttaaccagaatgccatacgtgaattgggtggtgtcccaattattgcaaaactgataaaaacaaaagaccccataattagggaaaagacttacaatgcccttaataacttgagtgtgaacgcagaaaatcagggcaagattaagacgtacatcagtcaagtgtgtgatgacaccatggtctgtcgcttggactcagctgtgcagatggctgggctaagactgttaaccaacatgactgtgactaatcattaccaacatttgctttcctattcttttccagacttttttgctttgttattcctgggaaatcacttcaccaagatacagattatgaaactaattataaactttactgaaaatccagccatgacaagagagctggtcagttgtaaagtaccatcagaattgatttccctctttaataaagaatgggatagagagattcttcttaatatccttaccctatttgagaatataaatgacaacataaaaaatgaagggctcgcatcatccaggaaagaattcagcagaagttcactttttttcttattcaaagagtctggagtttgtgttaagaaaatcaaagcactagcaaatcacaatgatctggtggtgaaagtaaaagtcctgaaagtattaaccaaactctaatttggagtctgtcccaaacaatattgagatatttgcagttggtacgatgtgatttgtaaattctttgtttttcattgtgcgtatatggtaaagagatcttttcagctgctattttggaataatgactatcatatatcataacagtgactgatgttggttgtaatggttgggtttaggatgaaccattttaaggatgccaaatgaaatattagtatttgtacacagaaagaatttattgatttgatcttattacctagattgagattttttaatctttcctctacctaaactgacaatgaattggttatacatcatgcataagctacacttttatattagtttatatttgttattctaagacttgtgtttcatcaataaagttgtgttttaagcagcagaaaaaaaaaa

SEQ ID NO: 12 - DNA, 3100 bp, homo sapiens
gcgctctggcgccgccgcggtcgctctaggaaagtggcggagcgaccctctatggtcccgggcccacccgaaagcgttgttcgtttcttcctgtggttttgttttctcctccccccaactcggaaggcgtcctgtgacccccgggacctcaagagctgtaaccgcccctgtgtgtggtcgaggcttttgaaaccaaactctagcctctccaacctagaaactgcatactttccacaaattttgagatttttgagaccctggtacttttcacgaagtcaccttaattatcaccaaaaagctcctgcaagatgggagtggttatactccatttacaggaaaggaaccaaggctcagagaagaaatgtgctccgttcaccgtgtgctcctcctcagccatcctggccgtgctcagtcatctgaccagctgacctccgtgttcccccactccctggggagctcctccgccttttggcttccaatgctattgctgcatgctgaagactcccgcattggtaactccagtctgactgtgggacataaatgttattgaactttagacttgtatatcgaactgattactcaagagctgcatttgcatgtgtaatggacatcccaaacctaacataccccccaaatgaattcctgatatctacctaacctgttcttgcaacagtcttcttcccagggatgggtgaagatcccatcatctttccagttgctcaagccaaaaaccttgatgtcactgttgtctcttctttttttcatccaaaattcacctgtgatttatccacaaattctgtcggcttcatcgttaaaatatattcattatcaagccactttcaacacttccactgctataaccaccaagccaccttcatccaccttctggattattatattggcttccagacgggttgccctacagtctattcacggccccagagtaatcctcttaaacctaagttagatcatgtcattcatttgttcaaaaccttcaaaggcttcccaacttattagagcaaagccaaggacctcgcagtggcacccgatgcctctcatgatctgtctctttagttctttattgtgtctgcagtgctgaaaacagtgctcagcagggaacagacactcagtaaatagctgttgaatgaatgaatttataagatgccttattgtttacaaagtacttttacatcttatcttctggttattcatcttcaccatagtctcatgaagcacagattatcatatctgtcttgcaaatcagtaaactgaagcaagagaggctgacctgcctgaagtaatacagtggtttgttggtggaggctaaactaagtcataggttcattctcttaagttggggctttctgctctgtagggagctgtctctgcatatggcaaagcacaaagctgaatgaggtctggacaaagaagctccactcgcaatctagagagtatctggactattgcagtgattaaatgaggtaatgtaaggcacttagcacaatgtataacacagaagaaatgagagtcgttgttacttttattattaaattgttataagttggttgatgctggtggttggagagtttggggtaaagggcaatggccagagatctagaaatggtttaggaaaagcgtcaggagcaaacatgacccgttgggactgtctgctctatgtacactaaaataaaaagataatttttaaaaagccattttgttagtaaggtagttactaattaaaactaactcctttaatgtctacataaagatggattatccctttttcctatacctgaaaacaactgggccagccatagaagggccagaggtatgtcaactaaagcattgggtaaacgaggatggattttttaaaaagagagagacgaaagtcaggaaataaaggggtgtgtgtccctaagtgtggacagagtcctgggcagtaaggatggagaggagggagagccagaaaaatatatgaaggagaggagggtaaaggagaatgggaaaaagacagggagagaaagcaggtagggttttatgccttcagcctagctgttagtataataatagttaacacttattgagtgcttattgtgtgccaggcactgtttgcagcatttgaggatctcacgtgagattcctgaggcatgattattcctgagggtttgctccaccttctctggttttggtccctgcactttgtggtgtgactccggtgcctcctggtgaaccacatgcctgtcccactgatgttgacttgaccactgatttgaattggctgaccgcatgtgactggatgcaaggggtacatcacatcccagaagaaacttcaagtcattgtgtttctgccaggactctgctctttccctctgccttgagaatagcatgtcccaagtaggggctgcccctttagtctaggaaccaggatgataagacacatggagcagagccacagaagctcacatgtaaccacaacggtcccacgtaatgttagagaaacaaatgctcttgtaacactgagattcttggtggtattattgcattaaagttgactaatgtacctcccaccaaccgtaagagataggaattgttattatcctgtgatattgtgaaatacatagttgatcttctccccgtttcctgacatacaacttctaaaatccttagaatctccaaagtgatgtctttttatatgctgatgagttgactgatgcctggcagcccctgggtagcttcaggatggggctggtcactggaaagaccacagcaggattagaaggatggcaatttcagctccaccccatcaacatctggggaggagggcaactgaaggtgaagtggatcaccaatggctgatggattaatcaatcatgcctgtgttacaaagtctccataaaagctcccaaaggactgggttcagagagcttctggatacctgaacacatggatgttactggagggtgccacctggggtcggggggtgcaaaggggaaggagtatggaagctccgcaccctttccttcatacctcactatatgcatttctttttctatatcctttggaatatcatttgtaataaaccaggaaatgtgtttcgctg

SEQ ID NO: 13 - DNA, 2502 bp, homo sapiens
gagtgcaccgcagccgctgcattcaggaaccgctttagcttcgcccccggccggccgggcggggaagactggtgtggtctggccatggatgggctccaggccagtgcagggccgttgaggcgcgggcggccgaagcgccggcgcaagccccagccacacagcgggtcggtcctggccctgcccttgaggtccaggaagatacgaaagcagctgcgaagtgttgtatcccgcatggcagcgctgaggacgcagacgctgcctagcgagaactcggaggaatcgagggtggagtcgacggccgacgacctgggggacgcgctacccggtggggcggcggtggcggccgtcccggacgcagcccggcgagagccatacggccacctggggcccgcagagctgctggaggcctcgcccgccgcgcgctccctgcagaccccgtcggcgcgcctggtgcccgcttccgcgccgcccgcgcgcctggtggaggtgcccgccgcgccggtccgggtggtggagacctcggccctgctgtgcaccgcgcaacacttagcggccgtccagtcgtccggggcccctgcgacggcgtcggggccgcaggtggataacacgggtggggagccggcctgggactccccgctgcggcgcgtcttggccgagctgaaccgcatccccagcagccggcggcgagcggcccgcctctttgagtggctcatcgcgcccatgccgccagatcacttttaccggcgcctatgggagcgcgaggcggtgctggtgcggcggcaggaccacacctactaccagggacttttctctaccgctgacctggattcgatgctgcgcaacgaggaggtgcagttcggccagcatttggacgccgctcgctacatcaacggacgacgcgagaccctgaacccacccggccgcgcgctgcccgccgccgcgtggtccctgtaccaggccggctgctccctgcgtctcctctgtccgcaggctttctctactactgtgtggcagtttttggctgtgcttcaagagcagtttggaagcatggcaggctccaacgtttacctcacgccccctaactcgcagggctttgccccccactacgacgacatcgaggccttcgtgctgcagctggaaggtaggaaactctggcgtgtataccgaccccgagtcccaaccgaggaactggctctgacatccagccccaacttcagtcaggacgacctcggtgagccggtgctgcagaccgtgctggaacctggagatttgctgtattttcctcggggcttcattcaccaagctgaatgccaggatggagtccactctctgcacctcaccttgtccacgtaccagcgcaatacctggggtgacttcttagaggccatactgcctctggcagtgcaggctgcaatggaagaaaatgtggagtttcggaggggtctgccccgagacttcatggattacatgggggcccagcattcagattctaaggatccgcgaagaaccgctttcatggagaaggtgcgggtcttggttgcccgcctgggacactttgctcctgttgatgctgtggccgaccagcgagccaaagacttcattcacgattctctgccccctgttttgactgatagggagagggcactaagtgtttacgggcttccaattcgctgggaggctggagaacctgtaaacgtgggggcccagttgacaacagaaacagaagtccatatgcttcaggatgggatagctcggctggtgggtgaggggggccatttgtttctctattacacagtggaaaactcccgtgtgtatcatctggaagaacccaagtgcttggaaatatacccccagcaagctgatgccatggaactgttgcttggttcttatccagagtttgtgagagtgggggacctgccctgtgacagtgtggaggaccagctgtccttggcaaccacgttgtatgataaggggctgctgctcactaagatgcctctagccctaaattagtttcttgttgattgctggaaacaaggcagtagtgattctccgctgccactgctaccttttttttttttttttccttaaactcacgttcttaccttgataagcatcagtgtgctcacatttacctttatcactgcttcagtgtcacaaacctcggaaggtcttctaggaagaaccatctcatctaggtacaaaaggaaaaggagaagttggaggtggaaaaaaaacccttgatccgtgatcatttcagagcaccaacttcatcaccttcaggcttcagtgtactgggtaacactgaccatgtcgttctgcttgagacagatattagattttttttggaatttggatctttcatctgagttctttttcatgggcgggtcggggtcagtatcctgtttgttattgttaaatttgtatgaaccttagaaaagttattaaagtgccaaagaatgtttccctttaaaaaaaaaaaaaaaaaaaaaaaaaaaaaaaaaa

SEQ ID NO: 14 - DNA, 3398 bp, homo sapiens
tgtctgctcaatcaagtcaaatactgaacaacttcctggcggagaggctgagaattttatacttgcttgctcgaaagcaccccaaataagatgatccacgccaacacctcccctttacaggttttaaaatattcttataactatgactgaaaacaagacagtttcctcttcttccactagagatgatcaaaccaatataggtttaacatgtcaggaagtaaaggctctcagagagaaggcatggtcaaggacaaatgaaggcaatgccatgtctcaaagtttggttctatatggagcctctaaggagaacagtgaaggttttcatgaaagtaaaatgacaaatactgaaggggtgaataaaggcatttactttagctacccatgtcgacgtcacagctgtgccgtagtaaatattccagcaccttgtgtcaacaaaatgatttcacacatccaagatgtggagtccaaaatacaggagcatttgaaaaggtttgaaacttcttttgaagaatggagcagaacttcttccacaaaagacctgaaagaagattggagtgtaactacaccagtgaaagaggtcaaaccaggagaaaagagagatgaaaagtgtccagagttaaagcaggaaatggaaacattgctctcagaggccattcgtctcattaaaagtctagaaactgaccgggcagacgctgaagaagctttaaaacaacagagatcaagaaagaatatgattaacatgaaaattgactcttggtcagtctggaaacttcaagaactcccattggctgtgcagaaagaacatgaggcctatttgagtgatgttatagaattacaatggcatcttgaagataaagctaatcaactacaacattttgaaaaacaaaagacagagttagaagaagcaaatgcaaagattcaagcagacatagactacatgaatgaacatggccctctactggactctaagcagaatcaggaacttcaagatctgaagaaccattataaaaaaaaaatggaggtaatggacctacacagaaaagttaatgaagaacttgaagaagctttagaagcctgtgaaaatgccagattgaaggctcagcaaattaaagaagagattgataaggatatttaccaggatgaaaaaaccatagaggcctacaagagagagatatatcaacttaacagtctatttgatcattactcttcatcagtgataaatgttaatactaatattgaggagaaggaagaggaagtgactgaagcaataagggaaacaaagtcatcaaaaaatgaattacattctctatcaaaaatgctggaagatttgagaagagtttatgaccaactaacctggaagcaaaaaagtcatgaaaatcagtatctggaagcagttaatgatttttatgctgcaaaaaaaacatgggatattgagctttctgatgttgcaaaagatttttcagctatttctttggcatgtacaaaactgacggaagacaataaaaaacttgagattgatattaacaaaataacagtaaaaaccaatgaaagcatacggaaaaaatcaaaatacgaatctgaaataaaatatttgacaataatgaagttaaagaatgataaacatctcaagaacatctataaggaggcttatcgcattggtactcttttccacctaaccaaacacaagacagatgaaatggaagataaaatagcagaagtgagaagaaagttcaagggtagagaagaattcctgaaaaaactcactcaaggtgaagtggctgctggaatggtgcttcagaaaaaactatattccatttacgaagtccaggcacttgagcggaaagagcttataaaaaatagagcaatatgtgccatgtcactggcagaactacaggaacctctgcttcaactagaagatgaagctgaaagaatcagaagtctcgacaaagaacattctgttatgcttaataatataattgatcagaaagatcttattagaagaaaggtgggaaaagtaaagaaaaaattacgaaaaaaggggaagaaaacccttgatgcattaatagaaactgagagtaaacgctcagcaatttttaaagacctagaagcaactaaaagtaagacaatgattttttatgcaaaaataaatgaattgaatgaggaattaaaagcaaaagaagaagaaaagaaaagttttgatcagacacttgaaatattaaagaacaaatttataactatgagatttaaaagggaacatgcacaaactgtgtttgatcattatatgcaagagaaaaaagactgtgaagagagaatctttgaggaagatcagagatttagagtgctccttgctgtaagacaaaaaactcttcaagatacccaaaaaataatagctgattcacttgaagaaaatctgcgtttagctcaagagtatcaacagctacagattacattcttaaaagaaaaggacaattatttcaatatatatgataaacagctatcacttgatacttcaattagagataagaaacagctctgtcagctgcagagaaggatgcacacactgtggcaggagcacttcaaactggtggtcctcttcagccagatgaggctggccaacttccagacagactctcaggagagtattcagaaaatattagctgtgcaggaggaatcttcaaatttaatgcaacacatcttaggtttcttccagactttgacagatggcacatgcgaaaacgatggttaagcaaacaaccaatgtatcttggatgctgaaataaaagacaagaaaagtcacacagttcagataacagtgtaattggacattcacctgtttgccatttcacacttccatgaacgaaaaactcactcacctcccagcatgctttgccactcttttactcacagcaaatccataacaatgaaacaggtgactttcatgctgctgtcaggaacgatctaatttcagctctgggtgactgattgcaattggctttgcctcatctgataattaatctatgtcaccattaattggaagagagaataattactggcggtgttgacagtgactgttcgcttccccagatttccctatcgtcttggcccaaataaaggctttgccattcagtacttaaagtttgtgtaaactgtaacaatatctatgcccatgtgacactttgagacactctgtctaatgtacttttgtttttgtgtttaccagtcttttttagctcactgagagctgtctctctcaatcactcctcaatgttctatcttaattttgtggaagtttaaagttttcaatgagctggagatgaatgattaatgaataaatttaaatgcttcattttgtccaaaaaaaaaaaaaaaaaaaaaaaaaaaaaaaaaaaaaaaaaaaa

SEQ ID NO: 15 - DNA, 1834 bp, homo sapiens
aatacccagatcttcaaggttggcaaagaagagaaaagctccttgggaacttagttaccaggtcttatagcaccagctctgtgtcctcagagtcgctgtcatcaaggagacctctcactggtcaccgccgcagcccccacatggaccagtatgtgtccacagctcctccccgattccctatagcacagctgggaacatttaaacaagactctgcaggaatgggacggatattcaaggggaatttgctgcagaagaaagcacttaccacatttgaaaatgaacaccatattcgtttcttcacattgttggttcttttccatgtgatggtgttgctgaggaatcatagcaggatacaaggggtttctgaagactggaaaagggccaacagcatatttcgaaactttctacgtttgaagtcatccaggaacacagcagaagcagaataaatgacactacgtttctctctcatggccttcataccatggatttcccctgctcaagatgaaaagaaattaagaggaaatcagattgcttagagatagcagattattgctcactttttaaaaggagctccacagagagaatgaagaacgtgtaactttttgcaatgataatgtctgctttgttcttgaggggcactcttcctttttctgttcaggaatattccggaggagagctgcagatgccacccaaccctgcgaaatctgccctgcgtgtcgaaacagatccagcagtgcaaagaacttcttcattaggacatcaagcctgtagtcatattttcaattgctgctgtaactttttccttgcaagtgctttcacttatttcgggaccacctaaggctctgtgtggtatacagcaacacagtttgagatatttctgtgatgttctgtatatcatatagttgctaacaacctgtcaaagtcatcctgacaccaaactgagaagctgatggtttgggtaacatattagaggagatgaaaaaaccgacagtcctcattactgtaataaaaccagcagagacacactgagaatcaattactgattgtgacctaatgaactaaccctcagtcaagtagaaaactgcaccaagcctcttacattatcaaatgatttaggatggagcactgtctgaagacgggcaacaagtcgaggcagatgagttttcttatattgtggctgacttaattaccttgttcctgagtgcagagatcaaattgagcaacttaaggtgctaaagctctgtgccagctggaaatgaaaaggaaataattaacaccaacaagagctacgtctaaggttgtggcacctcctgacagaagcaaggagactcaaagttaaggcggctgcaaagtccttgacgaggtgagccctgctctatccgcctggctggattcgtccaggttgcctgtggcagctgtgcactgaagagtccggctggggagccagggattcagaactcacagtgcagcctgacgaccaaagggcaaatccacctgaggacctgagtgcagatggctgggctccccggaacaaagtggaggaatgacagaggtgtaactcttacaccacagcctccatctgtgtgtcgcagagaaaaatactataatggagactattcttacacacatacacacacacacacacacacagagttcttgtcaccgatggaacagtctgtctttgtctttcatctcccacattcatgtccagatcccattgcgctgcatcacacgtgaacccagtgaggtcaacaatgaatggatggtgttcacaaagaaaccagcttatggaaggggacctgttacaattctttgaattaagttcttggaagcc

SEQ ID NO: 16 - DNA, 1933 bp, homo sapiens
gcacagtatctgggtccagcctgcagccctagggtccaggtgatgtttccgtgtgtgtggcccttcttcacagtggcctcctagaaaaacaagaccctgactcaaagaacacctctcactacattcagagtctgtcatctgaaccatgaggatctggtggcttctgcttgccattgaaatctgcacagggaacataaactcacaggacacctgcaggcaagggcaccctggaatccctgggaaccccggtcacaatggtctgcctggaagagatggacgagacggagcgaagggtgacaaaggcgatgcaggagaaccaggacgtcctggcagcccggggaaggatgggacgagtggagagaagggagaacgaggagcagatggaaaagttgaagcaaaaggcatcaaaggtgatcaaggctcaagaggatccccaggaaaacatggccccaaggggcttgcagggcccatgggagagaagggcctccgaggagagactgggcctcaggggcagaaggggaataagggtgacgtgggtcccactggtcctgaggggccaaggggcaacattgggcctttgggcccaactggtttaccgggccccatgggccctattggaaagcctggtcccaaaggagaagctggacccacggggccccagggtgagccaggagtccggggaataagaggctggaaaggagatcgaggagagaaagggaaaatcggtgagactctagtcttgccaaaaagtgctttcactgtggggctcacggtgctgagcaagtttccttcttcagatatgcccattaaatttgataagatcctgtataacgaattcaaccattatgatacagcagcggggaaattcacgtgccacattgctggggtctattacttcacctaccacatcactgttttctccagaaatgttcaggtgtctttggtcaaaaatggagtaaaaatactgcacaccaaagatgcttacatgagctctgaggaccaggcctctggcggcattgtcctgcagctgaagctcggggatgaggtgtggctgcaggtgacaggaggagagaggttcaatggcttgtttgctgatgaggacgatgacacaactttcacagggttccttctgttcagcagcccgtgacagaggagagtttaaaaatccgccacaccatccatcagaatcagcttgggatgaacttattcagatggttttactttattaattcctccaattattacaataatcataaaaaggtgaaaatggaaaagttattcccaaaactgattctgtgtaacttactatttttccaggagtaaatatttaaaatagctgcatggtttattctaatttatttcacatttcttattcctattatctgaagaatccctcgtctgtgcgtttcttgtgggaagagtgttttaatatcattttagtgctctgaggagtcatatgaagatgtatccctcatctgtgtttctgaggacattaaggggaaattagagggaaatgtttattcaatttagtactagcaacagctttaagctggtgatgctgtcatactccagaaagctgtagacactgctcattttgtcttttaaaaaaattttattttattttaagttctgggatacatatgcaaaacatgcatgtttgttacataggtaaacatgtgctgtggtggtttgctgtatctatcaacccatcacctaggtattaagccctgcatgcattagctatttgtcctggtgctctccctcccactttgctcattttctaacctaggttttaatcaccattttacccaacaaatcattgttcgatcattatttgccagacttgaatctctatgtgttttctaggactgctctaataaagtacacaaactgggagtctttaaacaacaaaaaaaaaaaaaaaaaaaaaaaa

SEQ ID NO: 17 - DNA, 1252 bp, homo sapiens
tcgagagttgggttcagtcctggcccgttgtggggacggcacgcgggggaaggggaggggacggagaccgaagaacggaggtccttatgtttcttttctttccttaaatcttgcccggcctgaagaggccggaagttgcatctctggacaagtaaactctgagacctgggaatggcgggcgggacccgctcctcccttggggtctagaggagacccccggagatggtccctgatgagcagcgtgatggtggaaagctggactggtctcccgaaaggcgaagccgaggcttcttcctctgaacttttggcacgttctttgacttgcttgtggccgtagtgtcaggcctgtattgcacatttatgtctgtggtgcatttctccatctgggccagctgaggggcccacggacatagggcacccacaataggcgtgtgtctgctgtgtgtttgtgttcggccgtcctgcttctctgtttccacacgtacacatgcccctgtgttactttggttcatcttctgtactctgtcagttttctgctggtcagaacatctgtgactgtgacagagctgtccaggattgcagtggataggaatttcttcacatggctcctggagaagtgaccatcacagttcgcctcatccgttcctttgaacatcgcaatttcaaacctgtagtgtatcacggagtgaatttggaccaaactgtaaaggaatttatcgtatttctaaagcaagatatccctttaaggaccaacctgccaccaccattcagaaattataaatatgatgcactaaagattattcatcaagcacataaatcaaagacaaatgaacttgtgttgagtttggaagatgacgaaagactcctgctgaaagaagacagcactctgaaagcagctggaatcgccagtgaaactgaaattgcattcttctgtgaagaagattataagaactacaaagctaatcccatttcatcctggtgaaaacatctcgagggcttcctttttgcatacctgtattaagctctttattccactgctgaatttttgaaattgacaaacaaatcttaaaaaattaatcccaggctatactctttgagctaaaatctggttatttctttctcttcaggtctttccttctctctttctttttctttgttgttgtaaaataatatattatgagaaaaacatttgatctttttaaagggaaataaattgttattaaaaattattgtggaaaaaaaaaaaaaaaaa

SEQ ID NO: 18 - DNA, 2215 bp, homo sapiens
cttccatctccatggttacgcggcggtggctgcgagcgcccaactgctccgactgtcgcggtgagggccccaggacagaagcagacagacacggctcctgctgtcgattccgatccagccagaatgcctccaactcaggccgaaagtgttataaggagtattatacgagaaataggacaagaatgtgcagcccatggagagattgtttctgaaactctgattgcttttatggtgaaagctgttgtcctggatccaagtaatggctttaacatggatagaaccctcatgaaaagtgatgtgcagaatcttgttaagctttgtatgactcggctattggatactaaaaatccatccctggacactattaagatgcaagtctacttcgatatgaattatacgaatcgagtggaatttctcgaagaacatcaccgggtcctagagtctagattaggctctgttacccgagaaattacagataacagagcatgtgctaaagaagaattggaaagcctctaccggaagattatcagctatgtgttactccgctctggccttggatcccctacagacatcaagactgtcagagaggtaacagctgctctacagagtgtttttcctcaggcagagcttgggacatttctaactctttctaagaaggacaaagaacgccagctgaaagaactcaccatgattgttactggaattcgtttatttaacagagactgtggaaaaggaggagaaggcattgatgatttgccagctgttctccatgtagcaatcccagccaccatgcagcatattgattaccagcttgagactgcccggagccaggtataccgctacacagccatccttgagaaggcagccaacgacccactcatgagggctgaacttcagccatatatgttaaaagaagcgctatataatatacgacaatatgaggtcttccttcagatcattttgtcagatataattactggtgctcaagaagtggaaatgatgacaaaacagttaggagcccatctggaacaactaaaaatgaccataaaatcaaagatagcggtcccaacatcacaagtctttcctatcttcattgcactttctactctgtggaccagcttgcaagacgaaactattgtggttggtgtcctcagtaatttattcactcacattcagccattcttgggtgctcacgaactatactttcctgagagagtgatgcaatgtcatcttaatggagcgactgtgaaaactgatgtgtgtagaatgaaagaacacatggaagatagagtaaatgtggcagatttcagaaaactagaatggcttttcccagaaacaacagcaaattttgataaactgttaattcaatatcggggattttgtgcttacacgtttgctgcaacagatggtcttctccttccaggaaatccagcaattggaattttaaaatataaagaaaaatattacacattcaatagtaaagatgctgcatattcatttgcagaaaatcctgaacattatattgacatagttagagaaaaggccaaaaaaaatacagagttaattcaactattggaacttcatcaacagtttgaaacatttattccatattctcagatgagagatgctgacaaacattatataaaaccaattacaaaatgtgaaagtagcacacagacgaatacacacatactgccaccaacgattgtgagatcatatgagtggaatgaatgggaattaagaagaaaagctataaaattggctaatttgcgccagaaagttactcactcagtacaaactgatcttagtcacttgagaagagaaaattgttcccaagtgtaccctccaaaggacactagcacccagtccatgagggaagacagcactggggtgcccaggcctcagatttacttggctggtcttcgtggaggaaagagcgaaatcaccgatgaggtcaaggtgaacttaactagagatgtggatgaaacctaattacagacaacgttttaaaatagatgctactcaattatgaacaatagcaagtacttaaaggtatattaacatctatacaaattaattttgtaggggtggcacattcattggttgtgtgactgtttattgggttcccatattttatcaaactgttttctgtaacacatttttcattctgttgaaattgaaaaataaaactgtccatttatcttttatttgttag

SEQ ID NO: 19 - DNA, 1171 bp, homo sapiens
atctttatccctttaagcatggtttattttctgagcaaggagtcatcatgggagaccttttttccttattttgggaggtagatcctcccccaatacctgtaaattgtgccattccaaatcaggattatgaatgctggaaggatgactcttgtggaaccatagggagcttcctgctttggtattttgttatcgtatttgtcctgatgttcttctctagggcttctgtctggatgtctgaggataaaaaggatgaaggcagtgggacaagtacttcagtaaggaaagcaagcaaagagacttcctgtaagcggcaaagcaaagacagtgcctgggatccctcacaaacaatgaagaaaccaaagcagaaccaacttacccctgtaaccaactcagaagtggctttggtcaatgcctatcctgaacaaagacgagccaggcgccagtctcagttcaatgaggtgaaccagaaccaacatgacagtgatactacggagtatggcagtgaagagtctaactcagaagcctcctcgtggaaggagagtgaaagtgaacaccacccatcaccagacagtattaagaggagaaaaatggctcagaggcaaaggaatctgggaagttaccaaatgagcgaaaggcactgcctccactgcaaagccttgagaaccaacgaatggttggcgcaccattcccgacagaagccttcagtaacaccgccaatgaaaagagacagtcaagaggaaagttccatatctgacattaacaagaaatttagtaaattttgaattttatcacgttcttccttcacttgaagccaaatgaaagagatgaataaaacatgaaaaatcaccagagctataggtgaggagacttttacaacaaagtctctctaccaacaaacaaaaacatacttggaacccaagaggtaaaatctcacacaattcttcgttcaaaaaaaaaaaggccatcacgtgtttatggcaccattggaacaccaaagatctatatctgctatgatttttttatttgaaatagcacaagacagatattttgtgccttgagtgtatatattttgtgccttgagtgtatgtattttgtttatgtctgtaatatgaataagaaagctctttgaaaatgtattatttatgttgagaaaccaaaaaaaaaaaaaaaa

SEQ ID NO: 20 - DNA, 1038 bp, homo sapiens
agttgggagcctgatggaggacaagtagggcctcgaggacaggtgcgtgacagaagcacaggaaaaaaaagaaaaatgaagaaataaaaacacgagttcatcagtaaagaggtaccctggcagcataaatattatgataagctaaaagctggaatcatctggaaaaataaataagactcctcatgtccttttcggtccataaccagaagggcagcaaaaggcctttgccactggaacctcttctttttctccaagtcccacgtagcaattacctgcactttcaagaagagaaacaacgactacacctaaagaaattccttcttgataggatgtttctagtggccaagatacaagcaaatgtagaaagaaaagatgttgctgactactatgaacaaatgtttcagtcagttttgaaacatcacctaggagaagcagtgacaggattgctgctcatctatcccacttccattctgcatatcctcgagtcctccagcgacactctctacaaagttcttttagattatattggccatgtcaaagatgaaacagtattttttattcaacaaatgaaaattatagtcatttctcataacattccaatgaggctttttatgcaatggcatgtttcagtgataaaagttccagttatgtatctcgacgatgtgacacagtcacagtccctaaaggaggtcatcacagattttctcacacaaactcataaactgtcactctacctttgccagactatgaaagtaggcactaaaggaccaggcgataacttacaccaagttgcacctgacctactcctcccagaacaaatcataaagtacttgtgcaaatccgaagaattcatggacccggcaacatttataaacatgtataatagacccatacacatcactctggattctgaggtggtatggcctgctccttcacgtttctaggattgagagggataatgtgcccatgtctcttaaggagtttgtgctacttaaataaaaaaaacatttttaaagttaaaaaaaaaaaaaaaaaaaa

SEQ ID NO: 21 - DNA, 3424 bp, homo sapiens
gtgatgcaatgatgacctcagggtaaactgccagaaggctaagggaaatggaatggctgctggaggacctgcttggggctaagggggatatggggcttctctggggccaactgacccatgccctagcctgcagacactgcggcagcagctgcttccagagtccaggaaatctggtgacactattcttattcgtggtttggcagattcagagatggtggcagcttgggaggttgcgacagcttcatccctggtgctctgggaatatggtgcaaggcaaggaactaccacttctgcaccgtgtggccttccttgatcacctgtgtaagcagaaatcagaagtggaggaagaaggggaagaagaggaagagggggaagacgaggcatctctggatccactgaagccatgttctcctaccaaagaagctcccactggagagcaagccactccagccccaccccagccatcctgtggttctgagggcctcctcaaggctatagggataccagagcaaacagtcatgcagcccgtgagcccttccagatccttccccatcttccagattctgaccagctttcctgtgaggcacaagatagcatcagggaaccgccagcagcagagaaaaagccagctcttctggggtctcccctctctgcacagcgagtccttggaggccatcttcctgagctcaggtggcccctctcctctgaagtggtctgtttgttcttctgtcttcttcaacaagcttgccttcctacctaggtccaacctgttgcttccccagtatcactcctcagcccagttttctacccatggggcccatactatggaagatctagaagggatggcccccgatcctcagctgcttccacctccatcttctccttctgtctcatcactactcctccatctgaggcccttccctgtggaccacaagggagttttatctggcgctgaggcacccacacagtcccctggaactagccccctggaagttctccctggatatgagactcatttggaaaccacaggacacaaaaagatgccccaagcttttgagcctccgatgccacccccctgccaatccccagcttctctgtcagaacccagaaaagttagccctgaaggaggacttgctatatctaaggacttctggggaaccgtgggatacagagagaaacctcaggcctctgagtcttcaatgccagtcccttgccctcccctagactccctgccagaactccagagagagagttccctggaagatccatccagatataagccccagtgggaatgcagagaaaactcaggaaacctctgggcttttgagtctccagtcttggacctcaacccagagctctctggaaccagccctgaatgtgtcccaccagcatctgagacaccatggaagggcatgcaaagtagagaaaatatttgggtccctgcagacccagtttcacctcccagccttccctcagtccctctcctggagtctctagtaatgggcccccagggagtcctgtctgaatccaaagctttgtgggagaccatggggcagaaagagaacctctgggcatctgattccccagaccctgttcatagcacacctccaaccacccttatggaaccacacagaatcaatcctggggaatgcctcgctacatcagaagctacatggaaggatactgagcattccaggaattcctcggcttctaggtctccatctctggccctcagcccacccccagctcttgcaccggagctgctcagagttagatccatgggggtcctgtctgattctgaagctagatgtggggacatacaaaagacaaaaaactcctgggcctctaagcacccagcttgtaacttaccccaagacctgcatggagccagccctctgggagtcttgtctgattctcagtctattgtaggggaaatggagcaaaaagaaaactgtgttcctgtgttcccaggtaggggctccagcccatcctcaaactctgtttcaaagtcccacgtaagtgagcctatcgcagaccaaagcaactataagcctgacggggaggcagtggagcaaagaaagaaccactgggccactgagctcccagcccccagctcactctctactcctctaccagagccacacattgaccttgaacttgtgtggagaaatgtgcaacaaagagaagttccccaaggccccagccctctggcagtggatcccctacacccagtaccccagcctcccaccctagctgaagctgtgaagattgaacgcactcatcctggtctacccaagggagtaacgtgcccaggggttaaggcagaggccccactctcccagagatggactgtcccagagttgctcacccatcctgggatccatgcctggcagtggagtagagagctgaaactcaggctgaagaaactgcggcagagccctgcctccagagcccctggcccaagtcaatcattttgcagctcccctattctgagctccacaattccagacttctggggactcccttcctgcccaccacagcagatttatccccccaatccatgcccccactcttcaagttgtcatcctcaagaagttcagcgcacagtacctcagcctgtccagtcctcccactgtcatcacttccaatcctcttcccagcttcagccacaggagtctggcagggcggaacaagggtctcagagaggggagaaaatgaaggggaagatggtgagccaggtcccatcccaagggccatgtgtacacatggaggctggtgtggactatctatctccaggcccaggagaaccctcaaactctaaggttctggtctcaggcaagagaaaggacaaggcttcagcctcatcctcagccaaaaagagagagcaccctaggaaacccaaagcaggagaccatagaagagggactgcaaggttggggttatccacagtcacagggaagaaccaccctgcccaggccagaagcctagtagaggcccctgtaagcacatttccccaaaggtctcaacacaggggccagagctctcaacacactgctcttccccagctgcttctccccaaagcttcgggtccccaggatcagccagaggcagggcgaagagcaagtgacatcctgacccctcgccactgtaagcactgtccttgggcccacatggagaagtatctctccttccctaccctcaaggcttcccttaccaggggtttgcaaaaggtgttagccaaatgcctggataaccatcgacccctacccaccaaatctagtcagtagagaaaaggctggtaatactagcacttggtatgccaagacctgaagccaaaccagggggaaggtggggatgtggagacaagaaatggaaattctaataaactagctgaattagataaatcccaaaaaaaaaaaaaaaa

SEQ ID NO: 22 - DNA, 1328 bp, homo sapiens
cgaggctgcgccgcgtggagtggcttggcttaacagcagggagggcagagcgatgctctttgacctcccagaagagtcacgtgggctgacccagagccggggcggaaaggctgcgttagtttcttccgggtcattgacagaagcgtcaattcctgggagtagttcgttggttttctttcccctcatccttttgcctgctcccggcgaggggtggctttgatttcggcgatgagctcccagaaaggcaacgtggctcgttccagacctcagaagcaccagaatacgtttagcttcaaaaatgacaagttcgataaaagtgtgcagaccaagaaaattaatgcaaaacttcatgatggagtatgtcagcgctgtaaagaagttcttgagtggcgtgtaaaatacagcaaatacaaaccattatcaaaacctaaaaagtgtgttaaatgtttacaaaagacagtgaaggattcttatcacataatgtgcaggccatgtgcctgtgaacttgaagtttgcgcaaaatgtggaaagaaagaagacattgttattccgttgaataaagaaacagaaaaaatagaacatactgaaaataatctaagttccaaccatagaagaagctgcagaagaaatgaagaaagtgatgatgatttagattttgatattgatttagaagacacaggaggagaccatcaaatgaattaatatcactgtattaaaagtctgccgggcacagtggctcacgcctgtaatcccaacactttgggaggccaaggagggtggatcacctgaggtcaggagttcgagaccagcctggccaacatggcggaaccccatctccactaaaagtacaaaaaattagctgggcgtggtggctcatgcctgtaatcccagctactcaggaggctgaggcaggaggattgcttgaaccctggaggcggagattgaagtgagctgagttcgtgccattacactccagcctgggtgacagagtgagactctgtctcaaaaaaaataaaataaaaagtcaatttagaatgtgaaattctgaccaccttttggctttgagtattttccaaaagatatttgaaatcctaatgaggaaatcagaaaaagctatggaaaaatagacaaatttcatacatgaacaatataaattgtgtatattacttaacatcaaactaaacaagattcagaattgatggttgtataagaactagctcatgtaaaaataaaataacattattacattgcctcaaaaattggtcctcggtaagtgccttttgataaatgatctcaaataaatgactcatagcaaaaaaaaaaaaaaa

SEQ ID NO: 23 - DNA, 3386 bp, homo sapiens
ttcaattcccctgcatccacactgcaaccgggtgcaagtctttcctaggttatagacagcccgcctccccacgagaccttctgcggactggctgcccctggcctcggcctgggtgggtgggtggtgctcgcgccgcccctactttcccctggggccctggagagccgcgcgctgggtgtgtgtgtgtgtgcgcgcgcgggtttggtggggaaatctccttcagtggaagctgctgagtgtcgttggcggaaagtatcctggagcccagcaaaagcctccaaagcactagagcttccctaaagaaaagcagaataaaagaaagacaagaagggaagcccgttcctctaaagcccgggtttccaatagtcccggatcctcctggagttgggcgaaggcgcagttggcagcagccgctgctggcacccggacttggaaaggcggtgttcccccttttcgggaggagggaggcagggacttgcaggcaagagttgcacctggtctaggaacctgcagagaaaagaactctggggagaagaactgccccggagcgcagcagccaccctccgaccatgccccggtgaggggggcggacttcgagggcaacttgccgcggactgcctgggcttagccagcgagctacgcgctcccgggagcccggaattgcacggcgcagcccggcggggggctatcgtctatgtcttcttggggcgccagacgaatcggggtctcgtttttgctggaagagcccagtgttggtggcttcaggtggctgctgccgccgccgccgccgccgccgctgctagtgcggtttccgccgctggtgcgaagagaagagacacgcgagcggggagacctccaaggcagcgaggcatcggacatgtgtcagcacatctggggcgcacatccgtcgagcccgaggggagatttgccggaacaattcaaactgcgatattgatcttgggggtgactgtccctggccggctgtcgggtgggagtgcgagtgtgcactcgctcggaagtgtgtgcgagtgtgtatgtgtgtgtgccgtgtcgggctccccccttccccccgttttcccgtcgagtgatgcacttggaatgagaatcagaggatggaaatagtctgggaggtgctttttcttcttcaagccaatttcatcgtctgcatatcagctcaacagaattcaccaaaaatccatgaaggctggtgggcatacaaggaggtggtccagggaagctttgttccagttccttctttctggggattggtgaactcagcttggaatctttgctctgtggggaaacggcagtcgccagtcaacatagagaccagtcacatgatcttcgacccctttctgacacctcttcgcatcaacacggggggcaggaaggtcagtgggaccatgtacaacactggaagacacgtatcccttcgcctggacaaggagcacttggtcaacatatctggagggcccatgacatacagccaccggctggaggagatccgactacactttgggagtgaggacagccaagggtcggagcacctcctcaatggacaggccttctctggggaggtgcagctcatccactataaccatgagctatatacgaatgtcacagaagctgcaaagagtccaaatggattggtggtagtttctatatttataaaagtttctgattcatcaaacccatttcttaatcgaatgctcaacagagatactatcacaagaataacatataaaaatgatgcatatttactacaggggcttaatatagaggaactatatccagagacctctagtttcatcacttacgatgggtcgatgactatcccaccctgctatgagacagcaagttggatcataatgaacaaacctgtctatataaccaggatgcagatgcattccttgcgcctgctcagccagaaccagccatctcagatctttctgagcatgagtgacaacttcaggcctgtccagccactcaacaaccgctgcatccgcaccaatatcaacttcagtttacaggggaaggactgtccaaacaaccgagcccagaagcttcagtatagagtaaatgaatggctcctcaagtagggaacaaagccaagaagaatcccacctcagtgaaatgctacaactgtgaattgacgtaacctagaatgtcccccttcttgcttctctctccttctttcccccaagcctcattcattcttgggattggccctttcttcatgaaaagtgtctgcaaaaccatggcagaggaatacatctctcacacatactcacaaacacacacacaagcacttgcacatacatacaaacacatgcaaacatacctacacacacacacactcttacaacctccatcatgggaagtcaagtttcagaaacaaaagtctcattcataagaggtcttagaagaaaataaccagttaacctgatttcaattttgataccgttttcctgaactaataaatctacccaatgagacttttcagcctttgtacatacaaaattcttccaaaagagagaggagaaaatacagctctgatggcatcaaacggactttgcatcaagtaatttcagatagtgtcctaggatcctttgagggtgctggtagcaggtgagcaggacaaagttgaccaaggacacttatttctagattatgattcttctgtttactcaacaatttacaaagaaaaaaaggacagacattgaagagctacacattgtatatatatcaccacagactataaggaaatggaattatttccctctttgtcacatatctgtagtaggatttgccaagatcagaaatgatccatttgctgtttcttgttttccaaaggtcatacattgtgtttggttattgttaccagctcaataaatgtgtttaacgagttaatttcatttttctggctttggtctgttctccttccttacaggctaagccctggctccatgcaactgcattctttgatttcacttgttccttcatctacatgttttgttcatttgcagccagtttttactgagtttgtggcaatcaggaatgcatttgctaagcaagtatgactttaattccactccatggctcaatcattcacatgaggtgagcttcagcctgagatagcaggcgacagacttcttgcgtttcaaaactgccatgcccccctgtgatgctcccgtgaaggaatgcactttgccttgtaagttcctgggaaaggggtatgttttctctccaggtgcagccagatctcacaaagtacaaaacgaatgcctttcttttcttgtttataatggtcactcactgtgtttggttactgtcaagaaatcaataaatgtgtttaacaagttacccagtaaaaaaaaaaaaaaaaa

SEQ ID NO: 24 - DNA, 1040 bp, homo sapiens
cacatgtaaactacttgaactccatttcatcttttttcataccatctctaagattgctgccgcatttgcttgttaaactgaaagcatgtttcttgcaaaggctctattggaaggagcagatcgaggtcttggagaagctcttggaggcctctttggaggaggtggtcagagaagagaaggaggaggaagaaatattggagggatagttggaggaattgtgaattttatcagtgaggctgcagcagctcagtatactccagaaccgcctcccactcagcagcatttcaccagtgtggaggcctcagaaagtgaggaagttaggcgatttcggcaacaatttacacagctggctggaccagacatggaggtgggtgccactgatctgatgaatattctcaacaaagtcctttctaagcacaaagatcttaagactgacggttttagtcttgacacctgccggagcattgtgtctgtcatggacagtgacacgactggtaagctgggctttgaagaatttaagtatctgtggaacaacatcaagaaatggcagtgtgtttataagcagtatgacagggaccattctgggtctctgggaagttctcagctgcggggagctctgcaggccgcaggcttccagctaaatgaacaactttaccaaatgattgtccgccggtatgctaatgaagatggagatatggattttaacaatttcatcagctgcttggtccgcctggatgccatgtttcgtgccttcaagtctctggatagagatagagatggcctgattcaagtgtctatcaaagaatggctgcagttgaccatgtattcctgaagtgggaactgagaagtcaagatcctccctggaggacaggactgaaaaccttgccaagctgtacacagttgctgataccctgtgcaacagctctcatttcctggcaagctctttcacaaccctacatatttctgatcatgtgctgccttttactgctgaattaaaacagatatttcataaaaaaaaaaaaaaaaaaaaaaaaaaaaaa

SEQ ID NO: 25 - DNA, 2762 bp, homo sapiens
ggcgaggaagtgggggcgctgagcaagcgagaggaaggctgaagggagctaggaaaagggcgctgatctctgcagcctgggagggcttttgtctcccggaggaaggccagaagagatggggtcccgagggcagggctcacacagcaagaaaacgaggagcatgcctgtcattttgagcccacagagaacggggagcggagccactggaggaccggctgctcgggcttattcggtagccgaggcggttaaacagttcagggctggaccagccgggactggagcagggtgcagtctccagggttgctgggcagcaccgagaccctttgagcaccgaacgaataaactacgggagctttccacacttgcacattgttcccgcgagttgcagacgcaggttcctgatgctagcgctcattccttggcagtcaccctcagtgaactacacagttgccgtgaccttcaggatgaatgcttggattccaggtttgctgagggccccagaaggctccttccaccgtatcatagtctaataaataattttgtcaagccagagaagctaacaaaggtagagacaaggcttaaagaaaagatagtggcggaaatgacggatctgaacaagcatataaaacaagctcaaacccagcggaaacagctactggaggaatccagggagctacaccgagaaaagttacttgtccaggctgaaaacagattctttctggaatacctgactaacaaaactgaagagtacacagagcaacctgagaaggtatggaacagctatttacaaaaaagtggagagattgaacgaagaagacaagaatcagcctccagatatgcagaacaaatttcagtgcttaaaacagcgctcttgcaaaaggaaaatatccaatccagtttgaagcggaagttgcaggcaatgagggacattgctatattaaaggaaaagcaggagaaagaaatacagacattacaggaggagacaaagaaagtccaagctgagacagcttcaaagacacgggaagtacaggcccagctcctccaggagaaaagattactggagaaacaactgagcgagccagacaggaggctactgggaaagagaaaaagaagagagcttaatatgaaggcccaggccttgaagttggcagcaaagcggtttatttttgaatactcctgtggcatcaacagagagaaccagcagttcaagaaggaattactgcagctaattgagcaagcccagaaactaacggctactcaaagccacttagaaaacaggaagcagcagctgcagcaggaacagtggtatctggagtccttaatccaggcgaggcagagactgcaaggaagtcataatcagtgcctaaatagacaggatgttccaaagaccacacccagtcttccccaaggcaccaaatcaaggattaatccaaagtaacttctaaaataacactgattaaataagaactggagcaagtactcttaagtgctacattaacctggttagaaaggctgttggattccagattgctattgtaaaatctccatcatgatgtgttggagtgaaggattagatggttttatccaacagtcctactagatatttggtaaccagcttcccttaactagctttttctttaaatactcgttaataagctattccacaaacctccagttaacctaacacatgaccctaacctagccatttaccatacatcaaactagctaaaggaaaccaacctaaggaagtgaaaacagttgtgatttatttcatctagctaaattgtatttctttatagagaaagtacctttaaggatagcattccaaatagactttgaatagcgttctgccagtttatcctcattccttttgaccaacttagcagacaaaagcagtttttacaagctctttgtgagtttgtgccagtgaccaggtagctccttctagttttctcatgagtgaaaaagcattctgataacagcaagtccagtaagtgctaggcagagtgacctttcatctgatgctaagcccctacaagtttgagaaggtaagaaaagatgaaggagacatatattaggtcagctcttacttttgaaaatgttttatttgaagaaacacctgtagcattgaggtgactgaatgcctccacttatttcaggaaaacgtatccaaaaaaagttgaaatatttggacaactttttttttaagtgccatcgatttccctagcagcattctaaaagatagcaagtaaaatgatgtttgttatcctaaatgctttagttttaggtcatttattaattttcttacaggtgcactttctagtacatgaagtatcctttgtaattaatgtgtgccatatgtttattcccatttagtataactataaattatattttaaattatatatttttaggatagttatattttttttgggttctacgacattgaagttggactagtgatttatttgaatgctgaatcctagtataggggaatataatcttatattttaacaggggtcctctatgggaaaataggatgaactttgtttcccagaaattgttaagtgatgaaaaacttcaaaataattttcctgcattttctgctttatttacatgtaaagtgaattccctgaaaattggatttaaaaagcattctccttcaatgtgcctttaccttgtagctttaacaacttttctgttaaatatgtagttttttattaaacaatgttattaaataaaaacatttatccactgatttt

SEQ ID NO: 26 - DNA, 9127 bp, homo sapiens
agtgtgagctgagctctttccctgaatgaatccaagtaaccctggccttctgaaatgaccagcagacacacaactgtccagaggctgcccaaagtataaactctggttctaaagtaccatgtccagccaaggaagtcctagtgttgcgctttctacgacgacagtcagttcagttgctgtgcaggctggggactccaaaatcgttatagctgtcataaagtgtggcaaatgggtacaacttcaactggctgaatcacagcccaatcttctagaaattggcagcagtcaagatgaaaccaaaaaacttcttcatgatcatgaacttcttttggccaagctcaaggctttggaagatcgggtatgggaactcttgcaggaagcagacaagacagctgaagagaacaaggatcagagtcaggtctatgatgccatggccgagactctgggtgaagcatgggcagctctggtgtccatgcttgaaagaagaacagagctccttaggttgacttctgaattttttgaaaatgccttagagtttgctattaaaatagaccaagctgaagatttcctccagaatactcatgagtttgagagtgctgagtccttaaaatcacttcttcagcttcatgaacatcatactaaagaactcttggaacggtctttagcccttttaaacaaaagtcaacaactcactgacttcatagaaaaattcaagtgtgaaggacctaatgtgaatcctgagttgactcagggagctcatagcagctgtctgaaggttgaccgccttcttgaacttctacaagacaggagaagacaactagacaagtacttgaagcaacagtggcaagaattgagtcaagttctgcagatatgtcagtgggaccaacaagaaaaccaggttacttgttggtttcagaaaactataagaaatttacaggaacaaagtctaggttcatcactttcagacaatgaggatcgaattcataagcaagaggaactgataataaaagcaaaggaatggaattctgctgttgagaagctgaagagtgaggcactgagaattctgctgtcaaaggactacgtggagaaagaacacctccagctctctcaccagaaactcagtcagcttcaagaagaatttggtcaactcatggtggaaaggaatacctggttaaagaaggcgaatgaattttttaacagtgctaacaaggcatttgatgtacttggaagagttgaagcttaccttaagctccttaaatcagagggtttaagtctggctgttttggcagtgaggcatgaggaattacacagaaaaattaaagactgcacaactgatgctttgcaaaagggacaaaccttaatcagccaagtagactcctgcagctctcaggtgtccggcatccatgagatgatggggtgcattaagagacgagtggatcatctgaccgaacagtgttcagcgcacaaggaatatgctcttaagaaacaacaactaacagcctcagtggagggttacctacggaaggtggaaatgtcaattcagaaaatcagtccagtactttctaatgcaatggatgttggttctacccgttctgaatcagagaagattttgaataaatatctggaactagatatccaagctaaggagacatcacatgaattagaagcagctgcaaaaaccatgatggagaaaaatgaatttgtatctgatgaaatggtatcactttcctctaaagctagatggctagcagaagaattaaacctatttggccaaagcattgactatagatcgcaagtcctgcaaacttacgtggcatttctgaagtcatcagaggaggtagagatgcagtttcagagcttaaaagaattttatgaaaccgaaatccctcagaaggagcaggatgatgctaaagccaagcattgttctgactcggctgagaagcagtggcagctatttttaaagaagagttttataacacaagatctagggcttgagttccttaatttaataaatatggcaaaagagaacgagatattagatgtgaaaaatgaagtgtacctcatgaagaacaccatggaaaaccagaaagcagaacgggaagaacttagcctccttcggctggcatggcagcttaaagccacggaaagcaagcctggaaaacagcagtgggcggcattcaaagagcaacttaaaaagacttctcacaacttaaaacttcttcaggaagcacttatgcctgtgtctgcacttgacctcggagggagcctccagttcattttagatctacgacaaaaatggaatgacatgaagcctcagttccagcaattgaatgatgaggttcagtacattatgaaagaatcagaggagttaactggcagaggagcccctgtaaaagaaaagtctcaacaactgaaggaccttattcacttccatcaaaaacagaaagagagaatccaggattacgaggatatcctgtacaaggtggtccagttccatcaagtcaaggaagagctgggacgtctcatcaaatcaagagagctggagtttgtagagcagccgaaggaactgggtgatgcccatgatgtgcagattcacctccggtgctctcaggaaaagcaagcccgtgtagaccatctccacagactggccctttccttaggagtcgacatcatctcatcagtgcagcggcctcactgctctaatgtttctgcaaagaacctacagcagcagctggagctccttgaggaggacagcatgaagtggcgtgccaaagctgaggagtatggacggaccctgtcccgtagtgtggagtactgcgccatgagagacgagataaatgagctcaaagactcattcaaagatatcaaaaagaaattcaataatttgaagtttaattacactaagaaaaatgaaaaatctcggaatctgaaggcgcttaaatatcaaattcagcaagttgatatgtatgctgaaaaaatgcaggctttgaaaaggaaaatggaaaaagttagtaataaaacctctgattctttcttaaattatccaagtgataaagttaatgtccttttggaagtcatgaaggatttgcaaaaacatgtggatgactttgacaaagttgtgacagattacaagaagaatttggacctgactgagcatttccaggaggtgatagaagagtgtcatttttggtacgaagatgcaagtgccacagttgtaagagttggaaaatattccacagagtgcaagacaaaggaagctgtgaaaattctccaccagcagtttaataagtttattgcaccctcagtgccgcagcaagaagaaaggattcaggaggccactgaccttgctcagcacttatatggtttggaagaaggacagaaatatattgagaaaatagtgacaaaacacaaagaggttcttgaatctgtgactgaattatgtgagtccctcacagagctcgaagaaaaactgaagcagggagatgttttaaagatgaatccgaatttggaagacttccattatgattacattgacttgctaaaggaaccagcaaaaaataagcagacaatattcaatgaagaaaggaataaggggcaggtgcaggtggcagatcttttgggcatcaatggaacaggggaagagcgactaccacaagacctgaaggtgtccactgacaaggagggtggcgtccaggacctgctcctgcctgaagacatgctctcaggggaagaatatgagtgtgtctcacctgatgacatctccttgcctcctctcccaggaagccctgagtcccctcttgcaccatctgacatggaggtggaagagcctgtcagctcctccctcagccttcacataagcagctatggggtgcaggctgggaccagcagcccaggggatgcccaggaatctgttcttccaccacctgttgcctttgcggatgcatgcaatgataagagagaaacattttcaagtcattttgagaggccttacctccagttcaaagctgagcccccactaacctccagaggattcgtggaaaagagtactgccttacacagaatcagtgctgaacatccagagagcatgatgagtgaagtgcatgagagagctttacagcagcaccctcaggctcagggtggtttgctagaaacacgggagaaaatgcatgctgataataacttcactaaaacccaagataggctgcatgcttcctctgatgcattctcgggcctcaggtttcaatcaggcaccagcaggggctatcagaggcaaatggttcctcgagaagagattaaaagcacatcagcaaagagcagcgtggtcagcctagctgaccaggcacctaatttctccaggctcctgtctaatgtaactgtcatggaaggttctccagtgactttggaagttgaagtaacaggatttccagagcctacactgacatggtacaagaagggccagaaattgtctgcagatgggcacttacaggttttacacaaggagacaaggcattcggtgttcattccaaaggtatgcaaggcagacgcaggcctctatgtggctcgggcccaaaactctagcggcgctctctcttccaatgtcatcctccacgtgacaggtaactgcaggctgccaatcacaagagtaaactggataaccctgtgtgtcgtctatgttagtgtgtccctaatgtactggctcctcacacaataactgtggtgttggcaccaatggacatcattctcatgtgcctaaagaaaagtgccgccgtttatcttcctgcacctcctgcaaagcatctcccaccaagtgtatctccagtctgatcaccatacttgtttggctaataccactgctaggtgaaataatcaaattttctggagcgtttaatatatttgagaagcttggtaaattatctgtagtggataagaacagatttttgtactctagaaacagatgttttcaacataatatgcagcaaaattattctatgcctattccctcctaatttaagggcgtgcagatgaaggctgacatcggcatagaaatgtgctaaatttcaaatatggttgttcaataatatatttttaattgtattttaaaacatccctttgtagggaatatcagtagaactattgaattgatgttgtatttttgcattagctgtcctttaattttgctttccatgtcttgatcttgttaccgaaatgcattctgtgtaatttcaacgtagactacgttcctgagtctgatgatgtcattgtaaataatcattcctcatgttgctctcacgggtttgacattggaggatagatgtgccatcaactttaaatagagtttccatcttttgtcagctctgcatgtcatacagcaagatggaacacaggttgcaagaaagaaccaacgttattcctgacattctattgatgtgttttgagcagcaatgtgtaaccaggtgtttctgcttctaatcttgattctgctgatgaccatttttatactttatggcaaagcctcattgcctcagtttcctgtctggaaaatgagttcatcatctacctcttgggcaattgagagttttcattttgtgtcttttaaacatctggaaaatggaaaacactgagggctaaggataatgatattgtttaatgtaatttgtcatcagaccggcctcctgctcactatttctttttttttagatgctgtttttttagaatattaaattaaaggagtgctgttaatatgtaatcttcaactagttccatggaggaaagtgatgttttatgaattagagcttaaattcctatctaatttctgaagactgcattcttttcaaagacttgaaattaaactcaggaggatacattttgtttgttctagggggaaacgtaatagaatggtatgagatgaattctatccttttacaataattattactataatattgaagtattctatgcctttctgaaacactttattcagaaaagatcattttttggcttccttttaaaaataagcttgaagtagggaagcatttgcttcttagattttaaatgtagtcttattatgctgaggaaaatctttagttgaaagaataattcattacagatttttgatgaagggaagaaattaattatgttgctggaagactgtctacaaataatcaaaatatttaaatgtaatgtattcaagttgttattaaaaagttactgaatgttatctgaagatgtgaaatgtgtagtcaagtaaaaagttggcgtatactttcttgggctgcatatccaatttaattaaaaaattaaatctcagtttccttctaaattttgatagaactatattaaaagcttgtatacacagcattctaggaaatttctcttaactatcttttttttgttttttttgttttttttttttttttttgagaaagagtcttgctctcttgcccagtgcagtggtgccatcttggctcactgcaacctccacctccgggttcaagcaattctcctgcttcagcctcctgagtagctaggattacaggcatgcctacctaatatttacatttttagtagaaaccaggtttcaccatgttggccaggctgggcctcagcctcccaaagtgccaggattacaggtatgagccaccatagccggcctcttgtatcctttttgtccaatttcaaataatgtgtgaatcttgcctaactgctgttgcccacgttgaagctaaagagtaaaaacctattcatgaacaaagaaggcaggtgagacccggtaacaaactgtctctcttcccactttctctttcttattaatttggcaggatctcccttcccattttgtcaacatggttgaatttgtgtgttggggttgttagggcatgggaattcctggtttgctttctctattgcatgcttgttcatgttaactctttggggagcagaatgagatacatatgcatccatggttatgatggaaaaaagcatgcaaaatccatttttagagagagagagaaagagaaaggtgggggtgggggagcacaaagatcagaagagtactatgctgatattcaagatatagtacagatagctttctgtgtacctatccatctacctattcatctgggctattgattgactcccacagcagtaaagaataattacgcagttattcttctggttatgttttaatttcaaaaagttaagtgtgattttcctttttgctgggatttctgtcttgagcaaataattattcttatgaaagtatcaattgcagttactggttaaaaatgtaagacctaggaaatttaagtgttgtttctattttaaggtatatacataatttataaccatttacttctagagaaaatcctgaatggttagtaatatcaaaacattttcaacaagaaaactaaaatgaaaagaaagtttaaaaattacatgtgttacagctcttttagaatttgtctagcaggttttctggtgaaaattaaactcaagattttcaccagaaaacgttttaaaacttctaaactcttaaacaaattataaatacttgatactttgaagaactgcaaaacaaaatgtttttaagttttcataaggcaaaatcattgagttttccagctttgattttccaataaaaggatgtataaatatttggtggtagtttttcacactcaattccaagagaaatttactgtaggaatctgtacatttgaatctctgaatattctatgatatttaaaatatttgaacaagatgcagaaaattttttagctatattaatcaataatggtaacctctatcactcataatcaagacacatacttaaaatagatgactacaagacccttctaactgctttgctcaaatttaaatttcctcaagtagttcatagaccctttacaacctggcctcccctctctggcctcggtttgatcccctcctattacccccaacccctagtaaagtgacatttaacttcagggttttaacatatcatgctcttctctccagccctttcttcctataactctcttactatcttcaccaccctatcttcatgtgacttaactcttgcttatgttccagttctgctgagacacaacttcccctgggaagcctcctgacccatcaagtccagagtagatggtcctgccatgtgcactgtcagcacctgcactgcccagccacgcccctgaatatacacaaaggaatcgcaggtttgagcatcagtctcctctggctaggctgtaagaaccttatcagcaggattcatgacagccctgttgtcattgtattgccagtacctaagacacagtcacactcagtaaactcttttgaattgaattgttgccaaaggtaaacaaagataaacctagcttgtttttctcccctttttagagggaggagaggggaaatgtaaaaagacaaagatgattctcccttcttatagacaggagtcaatccgaatcaggccctaacaatgaagcactcatgaaaatctctcacctcatctgcaaaacttgtgtgagaaccctccagaccctctgggctagaccctgattgaaaatttgaatttaaaaatagatgctggctccacggactaaaataatagtaaggaggaaagaggaaaggtccaggattgttgttcctggatcaatattgttccaacattttaaagtgttccaacattttaaaacatatgtacttaggcataaatcatcatccggtatgaggaactggatgcctccactctctatgactaaatccaaactgtcaaaaccagaatttatgtacttctttagaacactacgtaaatgatcaatatttaattgtagctggggctcagtagtctgggctgtgaacagatcttatttgaaaccagtatttcatacaaacttgtaaatataaagaaagccaaatccaagaacttaagagtatttgaattccaaatgaagaaaggaaagaatatcttattttgttctgctttatgtttgtctttattcatgaccatttcttactaaaaatcaccatctgaagcttttgaaactcctgttgtatgcacagcattttaagtgcagccatgaaataagttagttgaaacaaaataaaatatctccttccagta

SEQ ID NO: 27 - DNA, 3455 bp, homo sapiens
acttgcaaatcgctgtgtgctcgcagaagccagcacttccacagtctctaaccttcccatggcgagtgctgcagctctatcagcagaacctttctctccgtgtgaggaagagcttttttcccccctttccttttttttttttttcctttccccttaatcagaagcactgaatgaaagccaatcagagagagctcgcccccgttttcttcggttccctgctgtccagagttaaaagtgatgctgagaaagagcttgagttagattgaagtagaatcagtgatagaaaataacagccgaaaacaaacaaaaaggggacatagtgacaatttctcctgggttattttggctggaaccaacttccattatccagaagctgataaaaaagctttgggaaacatgaacaaaacattgatgaaatgttggaaaccagttgaaacacagtaaaaccaactgggtaaaataggaccacttctcttcatctacactgggatttgtcaagaagtgaactatgacaatacatcaatttttgctactgtttctattctgggtatgcctgccacatttctgctctccagaaataatgttcagaaggacgcctgtgccacagcaaagaattttaagttcacgtgtaccaaggagtgatggcaaaattctccatcgtcaaaaacgtggttggatgtggaatcaatttttcttacttgaagaatatacaggatctgattatcagtacgtaggcaagctacattcagaccaagataaaggagatggatcactcaaatatatcttatctggagatggagctggtactctttttattattgatgaaaaaacaggtgatattcatgccacaaggcgaattgatagggaggaaaaggccttttatactctacgcgcacaagctattaacagaagaactctgaggccagtagagccagagtcagagtttgtgatcaaaattcatgatatcaatgacaatgagccaacgttcccagaagaaatctatacagctagtgttcccgaaatgtctgttgtaggtacttctgtggtgcaagtcacagctacagatgccgatgacccttcatatgggaacagcgccagagtcatttacagcatacttcaagggcagccctatttctctgtggagcctgaaacaggtatcatcaggactgctttaccgaacatgaacagagaaaacagagagcaataccaagtggtcatccaggccaaagacatgggcggccagatgggaggcttatcggggacaaccactgtgaacatcacgctgacagatgtcaatgacaacccaccacgtttcccccagaacactattcatcttcgagttcttgaatcctccccagttggcacagccattggaagtgtcaaagcaactgatgctgacactgggaaaaatgctgaagtagaataccgaattattgatggtgacggtactgatatgtttgacatcgtgactgagaaggacacacaggaaggcatcatcactgtgaaaaagccactcgactatgagagccgaagactttatactctgaaagtcgaagcagaaaacacccatgtagatccccgtttttattacctaggaccatttaaagatactaccatagtgaaaatctctatagaagatgtggatgaacctcctgtttttagtaggtcctcctatctgtttgaagttcatgaagatattgaagtgggcacaatcattggtactgtaatggcaagggacccagattctatttccagccccattagattttccttggatcgccatactgaccttgacagaatctttaacattcattcaggaaatggatctctttatacatcaaaacctcttgaccgtgaactatctcagtggcataatcttactgttattgctgctgaaatcaacaatcccaaagagacaacacgcgtggctgtttttgtgagaattttggatgttaatgacaatgccccacagtttgctgtgttctatgacacttttgtatgtgaaaatgccagaccagggcagctaatacagactataagtgcagtagacaaagatgaccctttaggtggacagaaattttttttcagtttagctgctgtcaatccaaacttcacagtacaggataatgaagataatactgccagaatcttaaccagaaaaaatggattcaatagacatgaaatcagtacctatctcttgcctgtggtgatatcagacaatgattacccaattcagagcagcacaggcacactgaccattcgagtgtgtgcttgtgacagccaaggcaacatgcaatcctgcagtgctgaagccctgctcctccctgccggcctcagcactggggccttgatcgccatcctcctctgcatcatcattctactggttatagtagtactgtttgcagctctgaaaagacagcgaaaaaaagagcctctgatcttgtcaaaagaagatatcagagacaacattgtgagctataacgatgagggtggtggagaggaggacacccaggcctttgatatcggcaccctgaggaatcctgcagccattgaggaaaaaaagctccggcgagatattattccagaaacgttatttattcctcggaggactcctacagctccagataacacggacgtccgggatttcattaatgaaaggctaaaagagcatgatcttgaccccaccgcacccccctacgactcacttgcaacctatgcctatgaaggaaatgattccattgctgaatctctgagttcattagaatcaggtactactgaaggagaccaaaactacgattacctccgagaatggggccctcggtttaataagctagcagaaatgtatggtggtggggaaagtgacaaagactcttaacgtaggatatatgttctgttcaaacaagagaaagtaactctacccatgctgtctccacttcacaatatttgatattcaggagcattttcctgccagtcagcacaattttttttctcatttacttcttaatttgttcattaattacattaattctttcctgtaggatgtctcatggaatatatatgacattttatttaatcacttccaagagccaaagctatggaaatacagtgttgtccatcttagtaaataaaagataatttcagaaacatgaacaggatagttctcccttaagcaacctcacaaacaagccgcttctgttaggtacatgtcctgcccttgcaaatgaagcttttaaaaaggtgaagaaaaattttacagtatatcctgttctgtacattaaattaaaaaaacaaaaatgtacatgtgatgttagtaggtgtgatatgcaacctggtatacagacatttgtgcaatttcatttcatcaaattctatctgctaatgttttatatttatatttttgtatttatttttaaaaaaataaaccagtttttacaactaaaaaaaaaaaaaaaaaa

SEQ ID NO: 28 - DNA, 6810 bp, homo sapiens
cgccccgcacccgcctgcccgcccgccacctccccccggtttctcattcctgccactagcgcgctcggcggctcattccgcggccgccgccagctgaggggagcgtcgcgggccgaggagcagatgccgcgggggccgctcgcagccgccgctgacttgtgaatgggaccgggactggggccgggactgacaccgcagcgcttgccctgcgccagggactggcggctcggaggttgcgtccaccctcaagggccccagaaatcactgtgttttcagctcagcggccctgtgacattccttcgtgttgtcatttgttgagtgaccaatcagatgggtggagtgtgttacagaaattggcagcaagtatccaatgggtgaagaagaagctaactggggacgtgggcagccctgacgtgatgagctcaaccagcagagacattccatcccaagagaggtctgcgtgacgcgtccgggaggccaccctcagcaagaccaccgtacagttggtggaaggggtgacagctgcattctcctgtgcctaccacgtaaccaaaaatgaaggagaactactgtttacaagccgccctggtgtgcctgggcatgctgtgccacagccatgcctttgccccagagcggcgggggcacctgcggccctccttccatgggcaccatgagaagggcaaggaggggcaggtgctacagcgctccaagcgtggctgggtctggaaccagttcttcgtgatagaggagtacaccgggcctgaccccgtgcttgtgggcaggcttcattcagatattgactctggtgatgggaacattaaatacattctctcaggggaaggagctggaaccatttttgtgattgatgacaaatcagggaacattcatgccaccaagacgttggatcgagaagagagagcccagtacacgttgatggctcaggcggtggacagggacaccaatcggccactggagccaccgtcggaattcattgtcaaggtccaggacattaatgacaaccctccggagttcctgcacgagacctatcatgccaacgtgcctgagaggtccaatgtgggaacgtcagtaatccaggtgacagcttcagatgcagatgaccccacttatggaaatagcgccaagttagtgtacagtatcctcgaaggacaaccctatttttcggtggaagcacagacaggtatcatcagaacagccctacccaacatggacagggaggccaaggaggagtaccacgtggtgatccaggccaaggacatgggtggacatatgggcggactctcagggacaaccaaagtgacgatcacactgaccgatgtcaatgacaacccaccaaagtttccgcagagcgtataccagatgtctgtgtcagaagcagccgtccctggggaggaagtaggaagagtgaaagctaaagatccagacattggagaaaatggcttagtcacatacaatattgttgatggagatggtatggaatcgtttgaaatcacaacggactatgaaacacaggagggggtgataaagctgaaaaagcctgtagattttgaaaccaaaagagcctatagcttgaaggtagaggcagccaacgtgcacatcgacccgaagtttatcagcaatggccctttcaaggacactgtgaccgtcaagatctcagtagaagatgctgatgagccccctatgttcttggccccaagttacatccacgaagtccaagaaaatgcagctgctggcaccgtggttgggagagtgcatgccaaagaccctgatgctgccaacagcccgataaggtattccatcgatcgtcacactgacctcgacagatttttcactattaatccagaggatggttttattaaaactacaaaacctctggatagagaggaaacagcctggctcaacatcactgtctttgcagcagaaatccacaatcggcatcaggaagccaaagtcccagtggccattagggtccttgatgtcaacgataatgctcccaagtttgctgccccttatgaaggtttcatctgtgagagtgatcagaccaagccactttccaaccagccaattgttacaattagtgcagatgacaaggatgacacggccaatggaccaagatttatcttcagcctaccccctgaaatcattcacaatccaaatttcacagtcagagacaaccgagataacacagcaggcgtgtacgcccggcgtggagggttcagtcggcagaagcaggacttgtaccttctgcccatagtgatcagcgatggcggcatcccgcccatgagtagcaccaacaccctcaccatcaaagtctgcgggtgcgacgtgaacggggcactgctctcctgcaacgcagaggcctacattctgaacgccggcctgagcacaggcgccctgatcgccatcctcgcctgcatcgtcattctcctggtcattgtagtattgtttgtgaccctgagaaggcaaaagaaagaaccactcattgtctttgaggaagaagatgtccgtgagaacatcattacttatgatgatgaagggggtggggaagaagacacagaagcctttgatattgccaccctccagaatcctgatggtatcaatggatttatcccccgcaaagacatcaaacctgagtatcagtacatgcctagacctgggctccggccagcgcccaacagcgtggatgtcgatgacttcatcaacacgagaatacaggaggcagacaatgaccccacggctcctccttatgactccattcaaatctacggttatgaaggcaggggctcagtggccgggtccctgagctccctagagtcggccaccacagattcagacttggactatgattatctacagaactggggacctcgttttaagaaactagcagatttgtatggttccaaagacacttttgatgacgattcttaacaataacgatacaaatttggccttaagaactgtgtctggcgttctcaagaatctagaagatgtgtaaacaggtatttttttaaatcaaggaaaggctcatttaaaacaggcaaagttttacagagaggatacatttaataaaactgcgaggacatcaaagtggtaaatactgtgaaataccttttctcacaaaaaggcaaatattgaagttgtttatcaacttcgctagaaaaaaaaaacacttggcatacaaaatatttaagtgaaggagaagtctaacgctgaactgacaatgaagggaaattgtttatgtgttatgaacatccaagtctttcttcttttttaagttgtcaaagaagcttccacaaaattagaaaggacaacagttctgagctgtaatttcgccttaaactctggacactctatatgtagtgcatttttaaacttgaaatatataatattcagccagcttaaacccatacaatgtatgtacaatacaatgtacaattatgtctcttgagcatcaatcttgttactgctgattcttgtaaatctttttgcttctactttcatcttaaactaatacgtgccagatataactgtcttgtttcagtgagagacgccctatttctatgtcatttttaatgtatctatttgtacaattttaaagttcttattttagtatacgtataaatatcagtattctgacatgtaagaaaatgttacggcatcacacttatattttatgaacattgtactgttgctttaatatgagcttcaatataagaagcaatctttgaaataaaaaaagatttttttttaattctgggtttgattcttaacattgaaacaaacgttaagtatttctaatgatccatttatatttctaatttaattgtgatcttttaataaccctatttatgatctgttgttgtctgtctgctgcttttattgtttatttaaaatcaaatatgttttacaaatgttttttcagacaagattctgtaacatcatgtaaagcttttttgtacattcttggtgttaacctcctggcttctcttcacacacatcttctaaaaaagaaggatgtgaaagaactaggtcagtctatgactttgcaatatgtgttatatagtatgcatttatcttgtatatcagtaatttgatggttatgagagatgaatccatgagggaatggagctatcagaactctaatgttccaggtatacattctatgccccacactgagcactggggaactgggggactagagtcaaaaatataaatttgcccagactctaatgttattctattttttcttctgttgaacttaccaggctattgtaagactcttgatagttgaaactgcttatttttcctcctgtaattttaactaattgtaaaatgatgtggcattttatgttttaatgagaatgggcgattcatttaaaaaagctttgtttagaatatgcttggggccgtaagctcagaatgagggcagggaccattttggattctgagagtcgatgccatttggtccaggagtgtgtctacagtcccctgcattccagctagtttcttggggattgaaacttatgtgaagggcatttcacctgttcagttgggccaaaggtcaaaacgtagcaatacttggggaaagaccacataaagtcacactgcaagtgctttccctctttccccctacacacagggcacgtgctttttcttggattgcagacaatttttacagtttttttctgactttattgtgaaagtttgtttcaagcatttcttgatatcatgttatgtactatttttatgatttagtcaacatgcatacaaagaaatgttttttatgaagtgctcacttccattttactttgcattgaaatcaaattgggctgaacacttcaatggaatacattttgtggacaatgtcactttagaatctttcatctcagtgaaggattacacattctcaatacttccataattgcaggttgtgttcatttttttatatagtttttgtaatccaaagaatattttgctagatttgcacagatctccaattgaatttgcaatgaagaaataactcaaaaggaatatgaatagcatttaaataagtatacagctgtaagtaaccctgtcaccatggatgatccttttctctaggaatgtatttggattagagatgacaactacattttcgcatttttatgttgaagtcttttttaaaaaggctgtttacttttcagtagttaagaatacttgtttttctttttcttttttttttttttttttaccttttattttttcgttaagcctctattgtttgtagaacactcttagaaacttggaaataaaatgtctttcccaactagtggagtcctttttcatttggagcacattgccttaaaagaagtcttaatttaaacggtccttccttattctaaagtaatcactgttttataccatctatgcagctaaaagaaggaacatgcttctgttcttttcctcaagtaatggttattgtttctagtcatcattcattcattgattcattcattaattcatcaaaatcttattttataaaccctgttccacttactggaggattcagaatgaatcttactaccttttctgacatcttttgataattcagccctgtaccaaagtatccaccttgttgtcttataatcacctatttacctatttgccctcctagaaaatgcaagaagatattttctctccttccaaattgaaggaagaacataaaagatataacaggaaggagatggtgagatatagagtgtgagcggaaattaggccagctgtggcaattctggacagatcttgggtttagctaagttatttcttttaggcctgggtttctgggggtgacagggaagataaaagagtagtttatttgcacctcttggagaattgcttaaaaatatagagatcatggctctgtatgtcaggtggaaccaggtcaggagtatttgaaactgctcctgggtcattgtgacatatccttcacatctttttgagaaactttataagacaatgggggtgaatgggggctgggcagttggagtctctgagcagaagaggggcaaaatttatttggcaggcagtgtggaggacagattaggagcatataaacccagaggtgtgccccaggagggcttttgcaaaggtcaatatgagatagaatgagggcctgaaataattcagtaatttggagatggagaagaggaaagacttctctgctcttgcactgccatcagcctggtctgggccatggtcatctctgacccggaagactgaccccacctcttggctcaccctctgcctcccaacctcctcttcacaaagaagccagagggatacttttaacacacaacccagatcacatgacttcgtaacttaaacctcttcactggcttcccaaagacttaaaatgaattctgatgcctttattttattgctttacatgaacagggccctgcgaacctctccagtgtcattccactccatcctcctttcagtgcacgatgctccagccacactggccatctttcggttcctgatacaaaaaaaaacacgttccttttccatggaaagcaggtcacccttgttattttgtatcgatgacaactctttaaacttattttgctttttggctttatgtatgtgtgtgggtgggtgggactgactgccccactagaatgtaagctccatgagggcagggaatcttgctttcttgtttaccattgtatactcagttctttacacagtgcctgaaacataacaggtacacaataaatatctattgaatgaaagcaaaaaaaaaaaaaaaaa

SEQ ID NO: 29 - DNA, 1091 bp, homo sapiens
aactgacttgaagatgtgtgattattttcagtaggcagacatctaaccctgaaaaccactcgcttgcagagcgctggatcagcaatgcctactagttcttcattcaaacaccggattaaagagcaggaagactacatccgagattggactgctcatcgagaagagatagccaggatcagccaagatcttgctctcattgctcgggagatcaacgatgtagcaggagagatagattcagtgacttcatcaggcactgcccctagtaccacattggttgatcgtgtttttgatgaaagcctcaacttccaaaagattcctccattagttcattccaaaacaccagaaggaaacaacggtcgatctggtgatccaagacctcaagcagcagagcctcccgatcacttaacaattacaaggcggagaacctggagcagggatgaagtcatgggagataatctgctgctgtcatccgtctttcagttctctaagaagataagacaatctatagataagacagctggaaagatcagaatattatttaaagacaaagatcggaattgggatgacatagaaagcaaattaagagccgaaagtgaagtccctattgtgaaaacctcgagcatggagatttcttctatcttacaggaactgaaaagagtagaaaagcagctacaagcaatcaatgctatgattgatcctgatggaactttggaggctctgaacaacatgggatttcccagtgctatgttgccatctccaccgaaacagaagtccagccctgtgaataaccaccacagcccgggtcagacaccaacacttggccaaccagaagctagggctcttcatcctgctgctgtttcagccgcagctgaatttgagaatgctgaatctgaggctgatttcagtatacatttcaatagagtcaaccctgatggggaagaggaagatgttacagtacataaatgactttctcttgattgttgaaaaatcattacctgtggaatgactaggaatattggaagcagcatagtgttgacgtacgcaaaacaagacagcttggtcagctacaaaaaacaaaaaaaaaaaaaaaa

SEQ ID NO: 30 - DNA, 2282 bp, homo sapiens
gttgtacttttagcttcccccatcctgcaaggccactcaaccatgtgctagctggagtgatctttattcacaatgtctttacaaaggctcctgcaacacagcagcaatggcaatttggcggacttctgcgctgggccagcgtatagctcttactccacactcaccggcagccttacgatggacgataatagaaggattcaaatgctagcagacacggtggctactctgcctcggggacgaaagcagcttgctttgaccagatcaagttctttaagtgacttttcctggtctcaaagaaagcttgttactgtggagaagcaggataatgaaacatttggatttgaaattcagtcttacaggccccagaatcagaatgcctgctcctcggaaatgttcactttgatatgcaaaatacaggaggacagcccagctcactgtgctggcctgcaagctggtgatgtccttgcaaatatcaatggtgtgagcacagaaggttttacctacaaacaagtcgttgacctgatcagatcgtccggaaacctgctaacgatagagactcttaatggaacaatgattctgaaaagaacggagcttgaagcaaagctgcaggttttaaagcaaactttgaaacaaaaatgggtggagtacagatctctgcagttacaggaacatcgtctgcttcatggtgatgcagctaattgccccagtttggaaaacatggacttggatgaattgtctttgtttggacccctgcctgggccaggcccagcccttgtggaccggaatcgattatccagtgagagcagctgtaagagctggctgagctccatgacgatggacagtgaagatggctaccagacgtgtgtgtctgaggactccagcaggggtgccttcagtcggcagacgagtacagatgatgagtgctttatccccaaggagggggatgattttctgaggaggtcatcttcaaggaggaaccggagcatcagtaacaccagcagcggatccatgtctcccttgtgggagggcaacttatcaagcatgtttgggaccctgccccggaagagcagaaagggaagtgtccgaaagcaactcttgaaatttatccctggccttcatcgtgctgtggaagaggaagaaagtcgcttttgacggattgtggtgtcctttcaaattagcttatttcacaaatatctctagactcacccagatcccagcttggtgggaaagtgcagaagaattgcaaaactgacatcccatttcacagcaatagtgacctttatttaaattgttgtgttatagtttatgcttcttaaatcatttttcaacctaaacagccaatttctaagcagacaggaaaactaaataataagttaattaatataacaaagatgcaggttcctgctcattccagtaatgtctttgaaagcaaaactaatatttattttctagattatccctgtgaataattgagaactttttggagtcaagtatgaataaaggtgtggcagaatataataatctggactattttctataggataattgctgggttataaaatcttaggtttgcttatgcccagtagctcctgcggaggcttaataataggcaattttgaatttgttcaaacctgtaatggcttgtaaacaaagatgaccatcagctgtttctcacatctatagtgacaataaagcgggaagtataagatttaataggaggggttaaggttcatgagaaccatggaaagatgtggtctgagatgggtgctgcaaagatcataataaagtcatttttatagacagtctaaacaaaatgggtggggatgtcgtgttttttgcccaattcagcttttgttctgcctgaacattaatggcaagtctagaactctccgaatcctacagctttgtaattttttttctacaaatgtctaacatccaaaactgagggttgggaaaaggacttccctcctgtagtttttttcatattacttctcactttatatcttatattctaaatagctatcacctcagcagtcttttgcctattggttatgttagtatcacattacttctagcctttcaattactccatgttttatttaatatccattgaagtctatgaattctctgttctggtggcacagctattcataacctatattctagagtagacaatctggactatgtaataaatagtctgctgattttaaaaaaaaaaaaaaaaaaaaaaaaaaaaaaaaaaaaaaaaaaaaaaaaaaaaaaaaaaaaaaaaaaaaaaaaaa

SEQ ID NO: 31 - DNA, 2115 bp, homo sapiens
atggtttctccaacgaaaatgataataaggtctccgttaaaggaaacagataccaacttgaaacataataatggaattgccgcatcaacaacagcagcgggccacttgaatgtgttttctaacgacaataattgcaacaataacaataccactgaatcctttccgaagaaaagatctcttgagcgcctcgagctccaacagcagcagcatttgcatgaaaagaaaagggccagaatagaaagggccaggtctattgaaggcgctgtccaagtcagcaaaggtacgggtctgaaaaatgtcgagccaagggttacgcctaaggaattgctggaatggcaaacaaattggaaaaagataatgaaaagagattctcgcatttactttgacattactgatgatgtagagatgaatacatataataagtccaagatggacaaacgcagagatttattgaaaagagggtttcttacattgggtgcgcaaataactcaattttttgacactactgtcacaatagttatcacaagaaggtctgttgagaacatatatttactaaaagataccgacattttatcgagagctaaaaaaaactacatgaaagtttggagttacgaaaaggctgccagatttctgaaaaatcttgatgttgatttggatcatttgagcaagactaaatctgcttctttagctgcgcccacattgtccaatcttctacacaatgaaaaattatatggaccaacggatagagaccccagaactaaaagagacgatattcactactttaaatatcctcatgtatacctttatgacctatggcaaacttgggcccccataataactttggaatggaaacctcaagaactaacaaacttagacgaactaccttacccaatattgaaaataggttcattcggaagatgcccttttataggggataggaattatgacgaaagttcttataagcgcgtagtaaagagatactcgagagacaaagcaaacaaaaaatatgcactgcaacttcgtgctctatttcaatatcatgccgacaccttactgaatacgtcatcagttaatgatcaaacgaaaaacctaatattcatacctcacacatgcaacgattctaccaagagcttcaaaaaatggatgcaagaaaaggcaaaaaattttgagaagaccgagttaaagaagacggatgatagcgcagttcaagatgttcgtaatgaacatgctgaccaaaccgatgaaaaaaatagtatattattaaatgaaactgaaaccaaagagcctccgttgaaagaagaaaaagaaaataaacaatctatagcagaagaatcgaataagtacccacagcgaaaagagctggctgccacaccaaaactaaaccatccagtattagctacttttgcaaggcaagaaactgaagaagtgccggatgatttgtgcactttgaaaacaaagtcacgtcaggcatttgaaatcaaagcaagtggtgcacatcaatctaatgatgtggcaacctcttttggcaatggtttgggcccaacaagagcaagcgtcatgagtaagaacatgaagtcattaagtagactaatggttgatagaaagctgggagtaaagcagacaaatggaaataacaaaaattatacagccactatagcaactactgctgaaacatcaaaggaaaatagacacagattagattttaatgctttgaaaaaagacgaagccccttcgaaagagacgggcaaagatagtgctgtacacttagaaactaatagaaagccccagaatttccctaaggtagctaccaaatcagtctccgcagactccaaagttcataatgacatcaagataacaaccacagaatctccaacagcatcgaagaaatcaacttccacaaacgtcaccttacattttaacgcacagacagcacagacagcacagccggtgaagaaagaaacggtaaaaaattccggatactgtgaaaattgtcgtgtaaaatacgaatctttagaacaacacatagtttctgagaagcatttgtctttcgctgaaaacgatttaaattttgaggctattgactcgttaattgaaaatctcagatttcaaatatag

SEQ ID NO: 32 - DNA, 2889 bp, homo sapiens
taccacaaatttactggcttaaaacgacgcaagtctgtaggtcagaagtctgacacgggtcttaactggtgacccgagtcagatttgggacacaaagaacagaaaccaagctgtgcaggtttctgacaggcagtccggttagggagccctacagcaacccgccggtcctctctctcaggcagttgctgccatggctcattattccaaccggttctcctcagcccagtctatctcagtggctccattcatagggtgatgtgcccggcgggacactaaccctaaccaagcagagagacggtcatgcccgtcacgacctcggccctcgccccggccgaggcttctcctgcaggtcgcgagaatcaggtgcgtcagcggcgtccgggaacgccggaagagccagtggagcggctctgtagtccaaagtaccccgtcgaccccagcacggccgctccaccgcctcctactagacccagtcctagggactgcgcagtcgcagagctccgtccgagtaccggaagcctaggccgccagcacttccgggaagtgacttcgtctccgaagccgattggttgttgctttgctcccgctcgcgtcggtggcgtttttcctgcagcgcgtgcgtgctgcgctactgagcagcgccatggaggactctgaagcactgggcttcgaacacatgggcctcgatccccggctccttcaggctgtcaccgatctgggctggtcgcgacctacgctgatccaggagaaggccatcccactggccctagaagggaaggacctcctggctcgggcccgcacgggctccgggaagacggccgcttatgctattccgatgctgcagctgttgctccataggaaggcgacaggtccggtggtagaacaggcagtgagaggccttgttcttgttcctaccaaggagctggcacggcaagcacagtccatgattcagcagctggctacctactgtgctcgggatgtccgagtggccaatgtctcagctgctgaagactcagtctctcagagagctgtgctgatggagaagccagatgtggtagtagggaccccatctcgcatattaagccacttgcagcaagacagcctgaaacttcgtgactccctggagcttttggtggtggacgaagctgaccttcttttttcctttggctttgaagaagagctcaagagtctcctctgtcacttgccccggatttaccaggcttttctcatgtcagctacttttaacgaggacgtacaagcactcaaggagctgatattacataacccggttacccttaagttacaggagtcccagctgcctgggccagaccagttacagcagtttcaggtggtctgtgagactgaggaagacaaattcctcctgctgtatgccctgctcaagctgtcattgattcggggcaagtctctgctctttgtcaacactctagaacggagttaccggctacgcctgttcttggaacagttcagcatccccacctgtgtgctcaatggagagcttccactgcgctccaggtgccacatcatctcacagttcaaccaaggcttctacgactgtgtcatagcaactgatgctgaagtcctgggggccccagtcaagggcaagcgtcggggccgagggcccaaaggggacaaggcctctgatccggaagcaggtgtggcccggggcatagacttccaccatgtgtctgctgtgctcaactttgatcttcccccaacccctgaggcctacatccatcgagctggcaggacagcacgcgctaacaacccaggcatagtcttaacctttgtgcttcccacggagcagttccacttaggcaagattgaggagcttctcagtggagagaacaggggccccattctgctcccctaccagttccggatggaggagatcgagggcttccgctatcgctgcagggatgccatgcgctcagtgactaagcaggccattcgggaggcaagattgaaggagatcaaggaagagcttctgcattctgagaagcttaagacatactttgaagacaaccctagggacctccagctgctgcggcatgacctacctttgcaccccgcagtggtgaagccccacctgggccatgttcctgactacctggttcctcctgctctccgtggcctggtgcgccctcacaagaagcggaagaagctgtcttcctcttgtaggaaggccaagagagcaaagtcccagaacccactgcgcagcttcaagcacaaaggaaagaaattcagacccacagccaagccctcctgaggttgttgggcctctctggagctgagcacattgtggagcacaggcttacacccttcgtggacaggcgaggctctggtgcttactgcacagcctgaacagacagttctggggccggcagtgctgggccctttagctccttggcacttccaagctggcatcttgccccttgacaacagaataaaaattttagctgccccagtttgtgcctccagcatatgaaaaggactatttgaatccccaaaacatcaggagtcgggaaacttcggaagacagctgtgcctggctctgtggctgcatgcagtgcttcacttggccagcagaggtcagctgtgccgagctgccccagccatgagaagagaagcctgcccttgctggcaggtggctatggccggcccagagccttcctgcccagctcctgcagccctgctgcctgggatcaggctgggagatgggccttcctgaccgccagccttcctctccccgagcacacgcacatgtagattcggggggaagctgcctgctcttccttagaggagccggggcagctatctgctggtccctttctgaacaactgttgatgtgtgaaaaaaaaaaaaaaaaaa

SEQ ID NO: 33 - DNA, 1393 bp, homo sapiens
agccctttgtttatggcctgatctagctaaggcttctagacttcaggagcttaagaatcgtccggagggctgggcgtggcggtgcaggcctgtagtcccacccactccgaaggctgcggagggaggatcaacttgagtctgggaactcagccaggaattcaagaccagcctgggcaacacagtgaggccccctacccacatcctctccgtccccgcaatctccttccatcccagggtgttgctgaaaatgtcagatgcaaatttggatagcagcaagaagaatttcttggagggggaagtagatgatgaggaaagtgtgattttgacactggtgccagttaaagatgacgcaaatatggaacaaatggaaccaagcgtttcttcaacttctgatgtcaaactggagaagcctaagaaatacaatccaggtcatctacttcaaacaaatgagcaatttacagctccacaaaaagctagatgcaaaataccagcccttcccttgccgaccattttgcctcccattaataaggtgtgtcgggacactttgcgggactggtgtcaacaactcggtttgagtactaatggcaagaaaatcgaagtttatctgaggcttcataggcatgcttaccctgaacaacggcaagatatgcctgaaatgtcacaagagaccagattacagcgatgttcgaggaaacgcaaggcagtgaccaagagagcaaggcttcagagaagttatgagatgaatgagagagcagaagagaccaatacagttgaagtgataacttcagcaccgggagccatgttggcatcatgggcaagaattgctgcaagagctgttcagcctaaggctttgaattcatgttccattcctgtttctgttgaggcctttttgatgcaagcctctggcgtcaggtggtgtgtggtccatggcagacttctctcggcagacacaaagggttgggtacgcctgcagtttcatgcaggtcaggcctgggtgcctaccactcacaggaggatgatttctctcttcttgttacctgcctgcattttcccatccccaggcatagaagataatatgttatgccccgactgtgctaagaggaataagaagatgatgaaaagattaatgacagtagagaagtagcagcaacctgtttgaatacaatgtactaaaggagggatgtactttcagatcatgtaacctattacgaaggagtggaagaggagacaatttgaatgaatcctcatgatctacaaaacaaaatcatagtgactaggactccacagtgaagatggttgactagtgacacagccccatctaaagaatccctttctgtatgtctgaaaacccattaaaataaagtcactgcaattggccttgtaaaaaaaaaaa

SEQ ID NO: 34 - DNA, 1052 bp, homo sapiens
ctttccgggctaccttgtagcaatttgaggctctgtcatcagtttctgctacgtttcaaagatccaggagaagcttagtgttgtgtcaagacgccgatggacccatcacagtttaatccaacctacaacccagggtctccacaaatgctcaccgaagaaaattcccgggacgattcaggggcctctcaaatctcctccgagacgttgataaagaaccttagtaacttgactatcaacgctagtagcgaatctgtttcccctctattggaagctttactccgtcgagagtctgtgggggcagcagtcctcagggaaatcgaagatgagtggctttacagcaggagaggagtaagaacactgctgtctgtgcagagagaaaagatggcaagattgagatacatgttactgggcggagttcgtacgcatgaaagaagaccaacaaacaaggagcctaagggagttaagaaggaatcaagaccattcaaatgtccctgcagtttctgcgtgtctaatggatgggatccttctgagaatgctagaatagagaatcaagacaccaagccacttcagccataaatcttattcttgcacctttttttcttgctagtaattttatatagcaggttgagaaagctactctatgctagtatagactatacaccaataattttgataatgagttctaggatgtatttttcttgtatctttttcttcctactatgatactagtaattcataagggatctgtgtaatctgaatgtatttcaataactttagctctactgtttgatttgacccaaagaagccaagacgatataagtattcccatgtgtcttagaagcccaaagtcagtgagatgaaacccaacatcaagaaattgaagcaaagttacttgtggataaagaaagcattaggtagtttggctatagcataattagattttctggctttcaaaaatttggattgcaatcacagcaaactttgttatttttacagttttcagtacaaaagtgtttatatagaaacaataaagttgacatttgagtaccttt

SEQ ID NO: 35 - DNA, 2835 bp, homo sapiens
agaaggccgcacgccccgggcatgcgcagcggctcgctcggaagctgcgacgccgagtttcactctggctgccttctcctgagagtcggagccacagccagagccctgcccaggccgagccggagctgcagcccgagcgcggtggtgccctcagccccgtcctcttgtcctcctcagcctcggtgccttggaatttgtgtcgctgagtcagcaagcctttcagatttgcccggtttttgttgtttgtggtttgtatcaagatgggaactcaaacaagtcattcctcctaaggagctggtgtcttcatccagaagggacagtttgtgccagctctccagagagaaaaggatctggtactgttctggagtggcctgtagcagacactgaaccaccagccagctgcatttgttgtcctggaagtcattgccaactctgccagtcacactggggtccccagagaagtcaagatctgccggaggcgctgggcaatgaccccgggactccaggccagaggggtctgaagctgtttgggaaagcagcgggactccttgggaagatggccatggccccaagcccttccctggtgcaggtgtacaccagccccgcggctgtggccgtgtgggaatggcaggacgggctgggcacctggcacccctacagtgccaccgtctgcagcttcatcgagcagcagtttgtccagcagaagggccaacgttttgggcttgggagcctggcccacagcatccccttgggccaggcagacccctcgctggccccttacattattgacctccccagctggacccagttccgccaggacaccggcaccatgcgggctgtgcggagacacctgttcccccagcactcagcccctggccgaggtgtcgtctgggagtggctgagcgacgatggctcctggactgcctatgaagccagcgtctgtgactatctggagcagcaggtggccaggggcaaccagctcgtggacttggcccccctggggtacaactacactgtcaactacaccacccacacgcagaccaacaagacttccagcttctgccgcagcgtgcggcgccaagcagggccgccttacccggtgaccaccatcatcgctccgccgggccacacaggcgtcgcctgctcttgccaccagtgcctcagtggcagcagaactggccccgtgtcaggccgctaccgccactccatgaccaacctccctgcataccccgtcccccagcaccccccacacaggaccgcttctgtgtttgggacccaccaggcctttgcaccgtacaacaaaccctcactctccggggcccggtctgcgcccaggctgaacaccaccaacgcctggggcgcagctcctccttccctggggagccagcccctctaccgctccagcctctcccacctgggaccgcagcacctgcccccaggatcctccacctccggtgcagtcagtgcctccctccccagcggtccctcaagcagcccagggagcgtccctgccactgtgcccatgcagatgccaaagcccagcagagtccagcaggcgctcgcaggcatgacgagtgttctgatgtcagccattggactccctgtgtgtcttagccgcgcaccccagcccaccagccctcccgcctcccgtctggcttccaaaagtcacggctcagttaagagattgaggaaaatgtccgtgaaaggagcgaccccgaagccagagccagagccagagcaggtcataaaaaactacacggaagagctgaaagtgcccccagatgaggactgcatcatctgcatggagaagctgtccacagcgtctggatacagcgatgtgactgacagcaaggcaatcgggtccctagctgtgggccacctcaccaagtgcagccatgccttccacctgctgtgcctcctggccatgtactgcaacggcaataaggatggaagtctgcagtgtccctcctgcaaaaccatctatggagagaagacggggacccagccccagggaaagatggaggtattacggttccagatgtcgctccccggccacgaggactgcgggaccatcctcatagtttacagcattccccatggtatccagggccctgagcaccccaatcccggaaagccgttcactgccagagggtttccccgccagtgctaccttccagacaacgcccagggccgcaaggtcctagagctcctgaaggtggcctggaagaggcggctcatcttcacagtgggcacgtccagcaccacgggtgagacggacaccgtggtatggaacgagatccaccacaagacagagatggaccgcaacattacgggccacggctatcccgaccccaactacctgcagaacgtgctggctgagctggctgcccagggggtgaccgaggactgcctggagcagcagtgacctcgcaccccagcacgcccgcctctggtggccaccccgctgccccatggctggctgggtggccaggcaggaagtgcccagcccgagaggctgggaggtttgttgagggtgtggggtgtgccccacctgaagccggggctccccctgcctgcctctctctcctcctcccctctgggaattgggcagccctgggcagttgtactcatgggggcttaggatgcagctacctcagtgcgcagggcccgtctgtcctctgggggctgcttcgggcccgcggtgctcggggcctggtgtggggcgagtagagacttccccagcctggacgggcgtgggttctgggtcagcttcttttacctcaattttgtttgcaataaatgctctatagccaaagccaaaaaaaaaaaaaaaaa

SEQ ID NO: 36 - DNA, 3911 bp, homo sapiens
gcagacggcaaccgggccgctgattgggcggcgaaggagccattcggggagactctggtgggttcggctgccccaagagtgataagttcggcttcagacacgccttagcgccagcagtgagtcggagctctatggaggtggcagcgggtaccgagtggcggctgcagcagcgactcctctgagctgagtttgaggccgtccccgactccttcctcccccttccctcccccttttttttgttttccgttcccctttcccctcccttccctatccccgacgaccggatcctgaggaggcagctgcggtggcagctgctgagttctcggtgaaggtatttcatttctcctgtcccctcccctccccaccccatctattaatattattcttttgaagattcttcgttgtcaagccgccaaagtggagagtgcgattgcagaagggggtgcttctcgtttcagtgcttcttcgggcggaggaggaagtaggggtgcacctcagcactatcccaagactgctggcaacagcgagttcctggggaaaaccccagggcaaaacgctcagaaatggattcctgcacgaagcactagacgagatgacaactccgcagcaaacaactccgcaaacgaaaaagaacgacatgatgcaatcttcaggaaagtaagaggcatactaaataagcttactcctgaaaagtttgacaagctatgccttgagctcctcaatgtgggtgtagagtctaaactcatccttaaaggggtcatactgctgattgtggacaaagccctagaagagccaaagtatagctcactgtatgctcagctatgtctgcgattggcagaagatgcaccaaactttgatggcccagcagcagagggtcaaccaggacagaagcaaagcaccacattcagacgcctcctaatttccaaattacaagatgaatttgaaaaccgaactagaaatgttgatgtctatgataagcgtgaaaatcccctcctccccgaggaggaggaacagagagccattgctaagatcaagatgttgggaaacatcaaattcattggagagcttggcaagcttgatcttattcacgaatctatccttcataagtgcatcaaaacacttttggaaaagaagaagagagtccaactcaaagatatgggagaggatttggagtgcctctgtcagataatgaggacagtgggacctagattagaccatgaacgagccaagtccttaatggatcagtactttgcccgaatgtgctccttgatgttaagtaaggaattgccagcaaggattcgtttcctgctgcaggataccgtagagttgcgagaacaccattgggttcctcgcaaggcttttcttgacaatggaccaaagacgatcaatcaaattcgtcaagatgcagtaaaagatctaggggtgtttattcctgctcctatggctcaagggatgagaagtgacttctttctggagggaccgttcatgccacccaggatgaaaatggatagggacccacttggaggacttgctgatatgtttggacaaatgccaggtagcggaattggtactggtccaggagttatccaggatagattttcacccaccatgggacgtcatcgttcaaatcaactcttcaatggccatgggggacacatcatgcctcccacacaatcgcagtttggagagatgggaggcaagtttatgaaaagccaggggctaagccagctctaccataaccagagtcagggactcttatcccagctgcaaggacagtcgaaggatatgccacctcggttttctaagaaaggacagcttaatgcagatgagattagcctgaggcctgctcagtcgttcctaatgaataaaaatcaagtgccaaagcttcagccccagataactatgattcctcctagtgcacaaccaccacgcactcaaacaccacctctgggacagacacctcagcttggtctcaaaactaatccaccgcttatccaggaaaagcctgccaagaccagcaaaaagccaccaccgtcaaaggaagaactccttaaactaactgaaactgttgtgactgaatatctaaatagtggaaatgcaaatgaggctgtcaatggtgtaagagaaatgagggctcctaaacactttcttcctgagatgttaagcaaagtaatcatcctgtcactagatagaagcgatgaagataaagaaaaagcaagttctttgatcagtttactcaaacaggaagggatagccacaagtgacaacttcatgcaggctttcctgaatgtattggaccagtgtcccaaactggaggttgacatccctttggtgaaatcctatttagcacagtttgcagctcgtgccatcatttcagagctggtgagcatttcagaactagctcaaccactagaaagtggcacccattttcctctcttcctactttgtcttcagcagttagctaaattacaagatcgagaatggttaacagaactttttcaacaaagcaaggtcaatatgcagaaaatgctcccagaaattgatcagaataaggaccgcatgttggagattttggaaggaaagggactgagtttcttattcccactcctcaaattggagaaggaactgttgaagcaaataaagttggatccatcccctcaaaccatatataaatggattaaagataacatctctcccaaacttcatgtagataaaggatttgtgaacatcttaatgactagcttcttacagtacatttctagtgaagtaaacccccccagcgatgaaacagattcatcctctgctccttccaaagaacagttagagcaggaaaaacaactactactatctttcaagccagtaatgcagaaatttcttcatgatcacgttgatctacaagtcagtgccctgtatgctctccaggtgcactgctataacagcaacttcccaaaaggcatgttacttcgcttttttgtgcacttctatgacatggaaattattgaagaagaagctttcttggcttggaaagaagatataacccaagagtttccgggaaaaggcaaggctttgttccaggtgaatcagtggctaacctggttagaaactgctgaagaagaagaatcagaggaagaagctgactaaagaaccagccaaagccttaaattgtgcaaaacatactgttgctatgatgtaactgcatttgacctaaccactgcgaaaattcattccgctgtaatgttttcacaatatttaaagcagaagcacgtcagttaggatttccttctgcataaggtttttttgtagtgtaatgtcttaatcatagtctaccatcaaatattttaggagtatctttaatgtttagatagtatattagcagcatgcaataattacatcataagttctcaagcagaggcagtctattgcaaggaccttctttgctgccagttatcataggctgttttaagttagaaaactgaatagcaacactgaatactgtagaaatgcactttgctcagtaatacttgagttgttgcaatatttgattatccatttggttgttacagaaaaattcttaactgtaattgatggttgttgccgtaatagtatattgcctgtatttctacctctagtaatgggctttatgtgctagattttaatatccttgagcctgggcaagtgcacaagtctttttaaaagaaacatggtttacttgcacaaaactgatcagttttgagagatcgttaatgcccttgaagtggtttttgtgggtgtgaaacaaatggtgagaatttgaattggtccctcctattatagtattgaaattaagtctacttaatttatcaagtcatgttcatgccctgattttatatacttgtatctatcaataaacattgtgatacttgatgtagtga

SEQ ID NO: 37 - DNA, 5180 bp, homo sapiens
gcagatgcaaaatgtgtctctggccagcaggaggaaggaagaggaagtgagagcagcggcagccggcggtgcagcagccggccgacccagagtgtaagtgcgtgtgctggggcgagcgggagcgggcgaggatgggcacaggatagaggcagagccacccacgccgccgcggccccacgctgggcgacagagcctccagttccccttcaatggtggcgggtcgccggagctctgatcgccgggaacccttgccgctgctgtcctgcgaccccaagcaggtatagacacgtgtggccgtttacgctgtaggatcctcattcccactggctttgaacattttggggacttacaatgccgccacccgcggacatcgtcaaggtggccatagaatggccgggcgcctaccccaaactcatggaaattgatcagaaaaaaccactgtctgcaataataaaggaagtctgtgatgggtggtctcttgccaaccatgaatattttgcactccagcatgccgatagttcaaacttctatatcacagaaaagaaccgcaatgagataaaaaatggcactatccttcgattaaccacatctccagctcagaacgcccagcagctccatgaacgaatccagtcctcgagtatggatgccaagctggaagccctgaaggacttggccagcctctcccgggatgtcacgtttgcccaggagtttataaacctggacggtatctctctcctcacgcagatggtggagagcggcactgagcgataccagaaattgcagaagatcatgaagccttgctttggagacatgctgtccttcaccctgacggccttcgttgagctgatggaccatggcatagtgtcctgggatacattttcggtggcgttcattaagaagatagcaagttttgtgaacaagtcagccatagacatctcgatcctgcagcggtccttggccattttggagtcgatggtgctcaatagccatgacctctaccagaaagtggcgcaggagatcaccatcggccagctcattccacacctgcaagggtcagatcaagaaatccaaacctatactattgcagtgattaatgcgcttttcctgaaggctcctgatgagaggaggcaggagatggcgaatattttggctcagaagcaactgcgttccatcattttaacacatgtcatccgagcccagcgggccatcaacaatgagatggcgcaccagctgtatgttctacaagtgctcacctttaacctcctggaagacaggatgatgaccaaaatggacccccaggaccaggctcagagggacatcatatttgaacttcgaagaattgcttttgatgctgagtctgaacctaacaacagcagtggcagcatggagaaacgcaagtccatgtacacgcgagattataagaagcttgggttcattaatcatgtcaaccctgccatggacttcacgcagactccacctgggatgttggctctggacaacatgctgtactttgccaagcaccaccaagatgcctacatccggattgtgcttgagaacagtagtcgagaagacaagcatgaatgtccctttggccgcagtagtatagagctgaccaagatgctatgtgagatcttgaaagtgggcgagttgcctagtgagacctgcaacgacttccacccgatgttcttcacccacgacagatcctttgaggagtttttctgcatctgtatccagctcctgaacaagacatggaaggaaatgagggcaacttctgaagacttcaacaaggtaatgcaggtggtgaaggagcaggttatgagagcacttacaaccaagcctagctccctggaccagttcaagagcaaactgcagaacctgagctacactgagatcctgaaaatccgccagtccgagaggatgaaccaggaagatttccagtcccgcccgattttggaactaaaggagaagattcagccagaaatcttagagctgatcaaacagcaacgcctgaaccgccttgtggaagggacctgctttaggaaactcaatgcccggcggaggcaagacaagttttggtattgtcggctttcgccaaatcacaaagtcctgcattacggagacttagaagagagtcctcagggagaagtgccccacgattccttgcaggacaaactgccggtggcagatatcaaagccgtggtgacgggaaaggactgccctcatatgaaagagaaaggtgcccttaaacaaaacaaggaggtgcttgaactcgctttctccatcttgtatgactcaaactgccaactgaacttcatcgctcctgacaagcatgagtactgtatctggacggatggactgaatgcgctactcgggaaggacatgatgagcgacctgacgcggaatgacctggacaccctgctcagcatggaaatcaagctccgcctcctggacctggaaaacatccagatccctgacgcacctccgccgattcccaaggagcccagcaactatgacttcgtctatgactgtaactgaagtggccgggcccagacatgccccttccaaaactggaacacctagctaacaggagagaggaatgaaaacacacccacgccttggaaccgtcctttggtaaagggaagctgtgggtccacattcccttcagcatcacctctagccctggcaactttcagcccctagctggcatcttgctcaccgccctgattctgttcctcggctccactgcttcaggtcacttcccatggctgcagtccactggtgggacaagagcaaagcccactgccagtaagaaggccaaagggcccttccatcctagccctctgcaggcatgcccttccttcccttgggcaggaaagccagcagccccagactgcccaaaaacttgcccaccagaccaagggcagtgccccaaggcccctgtctggaggaaatggcctagctatttgatgagaagaccaaaccccacatcctcctttcccctctctctagaatcatctcgcaccaccagttacacttgaattaagatctgcgctcaaatctcctcccacctctctccctgcttttgccttgctctgttcctctttggtcccaagagcagcagccgcagcctcctcgtgatcctccctagcataaatttcccaaacagtccacaggtcccatgcccactttgcgtctgcactgtgatcgtgacaaatcttccctcctcaccagctagtctggggtttcctctccctgccccaggccagaactgccttcttcatttccacccacgctcccagcctcttagctgaaagcacaaatggtgaaatcagtagtctcgctccatctctaatagactaaacctaaatgcctctaggacggactgttgctatccaagcgtttggtgttaccttctcctgggaggtcctgctgcaactcaagttccacaggatggtcaagctgtcagacatccaagtttacatcattgtaattattactggtatttacaatttgcaagagttttgggttagtttttttttttttttttgctttgtttttgtacaaaagagtctaacattttttgccaaacagatatatatttaatgaaaagaagagatacataaatgtgtgaatttccagtttttttttaattattttaatcccaaacatcttcctgaaaataacattcccttaaacatgctgtggaataaaatggattgtgatgatttggggagctggtgttttgatttagtaacttaggttcttgctactcagtcatcagcatcacctgggagcttgttggagatgccagctcttcagctccaccctagacctgctgaattgggtgatgtttatgtacattggtttgaaaaacactgctgtgggaaaccctccaccattgctaggtcaccataggctctgagcatcagtggagaatgttacttctaagaagaccatctcgactcactgagaaaatcagacccactgtatgaaaatatctattccttttacattgctgtctcttgaccatgactttctcttttttctttcttaccatgatataatttatagaatgggtctaattaaagacatcacaactttgagggagcacatttagcaatgaaaagaatgcatacccacagacctgaaataagccagaactaaataaatctaaccgtgggttaataaattataggtcagagcccagcgaaggatgtttcttaagtcatttgcactggaggcattatcaggattgtaaactcccagcactgggagggatgtcagaagggtccaagcatgcagtattaagcgtggcacagcaccagccactctggcctcacagcacaagctgtggaagcatccaggtcatttctctttaccgtcatcaggatgtgcaattacagattgacctgggttgagatgatatggtccagagcactgcatgcattgcaggaaaaaagtcctttgcattcacaggggttccttcttcccatcagagcactcacacctgtgtcaagctgttaattccttgatcattaagcttcgatgttattaacatgtacttgctatcaggagcagttattaatctacccatcatcatgataaaacagtaagtgttaggtcaaaggcagcaaacaaagtcatattatttttttcttatgggttacaagatccaatccatgaaaaagggaactttctggaccaggatctctgaggtcctgagacactgggtttaagaaatgtatctgtcctgtgaccttggttggggagatccagcccctctctcttctggcactccagctttggtgcatttaatagaaagaaaccttttcaggactatgaaaggcagcattctccagctcctccctagaccctcctttggacctgtgagatctgaagagtatgccatctgtttccattcattttgtgaccatgtggggaaggattgttgcccatatttggccacctcaccttctctctccaggctgcccaaggctttttttcccatgcaatgagcctaccacctccaactcatctcctgttgcctgcagtttcctaagcctgggcaactcagccaaatccaaggcagaagtaaagtaggaagactgatgttgtcgtgaagtccaagttgcattctgctattcatattactcaaaataaaactgattacttaatttgaa

SEQ ID NO: 38 - DNA, 1455 bp, homo sapiens
gagattggatagcggcggggcgcaggaaagaggtcgcgccagcccgggcaggcagctttgcaagtccgcgttatatatcgcagtggctgcgcccgggatagctggctgcgccgccgcgcacatgcctaggttcgacgccctcctccctttgcccaggagttccttctgtcccggctctgttccgtctcgccccgaggttcacgccatcctcggagccccagcctttcacccagcgcctccaagctttggaccttgacttctgcaaaactagatggtcacagccatgaatgtctcacatgaagtaaatcagctgttccagccctataacttcgagctgtccaaggacatgaggccctttttcgaggagtattgggcaacctcattccccatagccctgatctacctggttctcatcgctgtggggcagaactacatgaaggaacgcaagggcttcaacctgcaagggcctctcatcctctggtccttctgccttgcaatcttcagtatcctgggggcagtgaggatgtggggcattatggggactgtgctacttaccgggggcctaaagcaaaccgtgtgcttcatcaacttcatcgataattccacagtcaaattctggtcctgggtctttcttctcagcaaggtcatagaactcggagacacagccttcatcatcctgcgtaagcggccactcatctttattcactggtaccaccacagcacagtgctcgtgtacacaagctttggatacaagaacaaagtgcctgcaggaggctggttcgtcaccatgaactttggtgttcatgccatcatgtacacctactacactctgaaggctgccaacgtgaagccccccaagatgctgcccatgctcatcaccagcctgcagatcttgcagatgtttgtaggagccatcgtcagcatcctcacgtacatctggaggcaggatcagggatgccacaccacgatggaacacttattctggtccttcatcttgtatatgacctatttcatcctctttgcccacttcttctgccagacctacatcaggcccaaggtcaaagccaagaccaagagccagtgaaggtttggagagaacaatgaagctccaggctctctcttctccagggcaccaagaggctgggcttagttttgggagaatgattaggttgccttacctgcatggtttccccagaggatgtgtgccccaaggtggctggaatttttgacagacaagaagggtgaccttgggatgggggtgtggtctgttactttaatgtttctgtttttaatgtgaaggccaagcaggccctgggatgggagtggggcggaggagggtcctaagagctgattatttaatttctatccagaaatctttcttcttcttgctctgtttttttaaattaaagatttcaacaaaaaaaaaaaaaaaaaaaaaaaaaaaaaaaaaaaaaa

SEQ ID NO: 39 - DNA, 5674 bp, homo sapiens
ctttttattttgagcctttttgatactgaacatgatatctgagtgaagaatttttgttttattattaagaaataaatgtatcttgcttcttgagatctccctggcttcagcaatttgtagttatttccactatagaccattaagaatatatttcaaaggcaagctaacaaagttcaagtaaaaattattttttatatattacagcttctaattggcattggtttcttctcaggttaaagctgtatttttcttaaaggcttataaaaattttgctgaaaaaaatgttggtgcttcggtgcaggcttggaacctcttttcctaaactagataacttggtaccaaaaggcaaaatgaagattctcctggtctttctagggcttcttggtaattctgttgctatgccaatgcacatgccccgaatgcctggatttagcagtaaaagtgaggagatgatgcggtataatcaattcaactttatgaacggcccacatatggcacacctggggcccttctttggaaacggtctccctcagcaatttccacagtaccagatgcccatgtggcctcagccaccacccaacacatggcatccacggaaatcctcagcacccaaacgtcataacaagactgatcagacccaagaaacccagaaacccaaccagactcagtcaaaaaagccaccacaaaagcggcctttgaagcagccatcacataatcaacctcagcccgaagaggaagctcaaccccctcaggcattcccaccatttggaaatgggctattcccctatcaacaaccaccatggcaaattccacagaggttaccaccaccaggttatggacgcccaccaatcagcaatgaagaaggggggaatccttactttggatattttggatatcatggctttgggggtcgccctccttattattcagaagaaatgtttgaacaagattttgaaaaacccaaagaagaagatcctcctaaagcagaaagtccaggcacagaacccacagctaattcaacagtcactgagacgaattctacccaaccaaatcctaaagggagtcagggaggaaatgacaccagccccacaggaaacagtaccccaggactaaacactgggaacaaccctccagctcaaaatgggattggcccactccctgcagtcaacgcttcaggccagggagggccaggaagtcaaatcccatggagaccaagtcagccaaatattcgtgaaaatcatccatatcctaatataagaaattttccttcaggaagacagtggtatttcactggtactgtcatggggcacagacagaataggcctttttacagaaatcaacaagttcaaaggggtcctcggtggaacttctttgcttgggaacgtaaacaagtagctcgtccaggaaatccagtttatcacaaagcttaccctcctacttcaagaggcaattatcccaattatgcaggaaatccagcaaatctcagaagaaagcctcaggggccaaataaacaccctgtaggaactactgttgccccactgggtcccaaacctggccctgttgttcgcaatgaaaaaatccaaaatccaaaggagaagcccctgggtccaaaagaacaaataatagttcctacaaagaatccaaccagcccctggagaaactctcaacagtatgaagttaataaatcaaattataaactgcctcactctgagggttatatgccagtcccaaattttaattctgttgatcaacatgaaaactcctattacccaagaggagattccagaaaagtcccaaattctgatggacaaacccaaagccagaatttgcccaaagggattgttttagggtcaagaaggatgccatatgaatcagaaactaatcagtcagaattaaagcacagctcatatcagcctgctgtataccctgaggaaatcccttctcctgcaaaagaacattttcctgctggaagaaatacttgggaccaccaagaaatctctccaccttttaaggaagatccagggaggcaagaagaacatttaccccatccttcccatggttctagaggaagtgttttctaccctgaatataacccatatgatcccagggaaaactcaccataccttagaggcaatacatgggatgagagagatgattctcccaatactatggggcaaaaagaaagtccactctaccccataaataccccagaccagaaggagatagtcccttataatgaagaggacccagttgatccaactggagatgaagtctttcctggacaaaatagatggggtgaagagttgagcttcaaaggaggcccaacagttaggcactatgaaggtgaacaatatacctcaaatcagccaaaggaatatcttccctattctttagataatccatcaaaaccaagggaggatttttattacagtgaattttacccatggagcccggatgagaattttccatcatataatacagcttctactatgccaccacctatagagagcaggggctactacgttaataatgccgctggaccagaagaaagcactctatttccttcacggaattcctgggaccacaggatacaagcccaagggcagagagaaagaaggccgtattttaacagaaatatctgggatcaggcaacacatttacaaaaagccccagctaggccaccagaccagaaaggtaaccagccctattacagtaacaccccagctgggcttcagaaaaatccaatatggcatgaaggtgagaatttgaactatggcatgcaaataactaggatgaattctccagagagagaacattcatctttccctaacttcatcccaccaagttacccatcaggtcaaaaagaagcacatttatttcacctaagccagagaggctcttgctgtgctggtagctccacagggcccaaggacaatccactagctctacaagactacactccatcctatggtcttgcacctggggagaaccaagacaccagtcctctgtatacagacggtagtcataccaagcagacaagagatatcatctccccaacaagcatcctaccaggccaaagaaacagctcagagaagagggaaagccaaaacccttttagagatgatgtgtccacgctgaggaggaacacaccatgttctataaagaatcaactgggccaaaaggaaattatgccctttcctgaagccagttcccttcaatcaaagaatacaccttgtctcaaaaatgatcttggaggagatgggaacaacattctggaacaagtttttgaagacaaccagctcaatgaaagaactgttgaccttactcctgagcagcttgttattggtacacctgatgaaggctccaatccagaaggcatccaaagtcaagtccaagaaaatgagagtgagaggcaacagcaaagaccatctaacattctgcatttgccatgctttggctccaaattagcaaagcatcactcttccaccaccggaactccatctagcgatggaaggcaaagcccatttgatggggattcaattacgcctactgaaaatcctaacacattggttgagttagctactgaggaacaatttaagagtataaatgtagacccacttgatgcagatgaacacagtccatttgaattccttcaaagagggaccaatgtacaggaccaggtacaagactgcttactacttcaggcctaggggttatccaaccaagcattcttggggaaagagaaatcactgacattctataccaatggttcccaaaattttttccccaagacttaattaagtgtctgactgtcttggtgatccttaagttttctcccctctcagcaataggagtagcgacccaggtggagctgagattaggcctctggggatcaccagatctagcactttcacagattagtgcagaccttaaaaaagcaagaaggccatgaccatccctgcctcgaaacttgcaagtcacttgtctgagttagtttccttttgcttgatgacttcttttgctctcaaagttccatacttgcaaaattggtttttcaagactgaaaggcagattaactttccattctacttatggagatccacacatcagtatagtcctgatgcactgtacgttttttgcttgtgttgatcttgtcaggtttttttcctactcaatattctcttcaagcattttttttcttccactgccactctctttacctttatcatttctttttcttagctttcttccttcttttctctctccctcaaccattctgtatttagctttctaatcctcatctttttctctctgtatatcacttcttacatattaaattagctattttaaccatttctagtctcttctttatgtctacctcctccattatgtcttcgtctcttccaacctatctgttctgtctcccaatgtaccacttatcaactaatccctctcctctctgattcctttcttcccttcaatttatctttttccctgttacaccattttcatcttaagactgcatgtcactctcttcctttttgtatccactctccaaatcgtaccctaaatttttcttgacccagcttaaccatcattacagaatatattttggaaatggtagacactgatagctactttgtttttagttatcttagggtctctaccaagtagacacagttcagttagagagacgtatttaaggagaagggaaggcaggatacccagaactagcagcctagggaaaaggcttaggaagatggagaatgaggaactgaagaaactgccgctctgagactgcacatccaggaaaaaagactaggacttgccacacactgccaattcataatccgcaggatctgtagaagacattttgggaaacactgtcttaaataaaaactcaatgtttagttgtttttttttttttttactagttcagcataagggattctaccagtatgtgctactactaacattcttcatgtccatgcagaattacttacagacactctttcttggtatcttgaataaattgtgtaaattattttgaaaagtggatatttctatatgccttgcttataatacatcagggattattattcttattaataacatgttggcctattatctggatgtcccttgcctagagcaggaaaaaagtctcagaattacctaaaaacatactttataactttaagagatttcttaggatacatcttcaggggcagatttcataacaacatctcaaaaatttggggaaacacaacgttgaaaacttcctaagaaaaggaatcttgcccttgaatcttctgaagtacctagcacagtgtcttcaacatagaaggtacccaataaatatatatcaattcattttttaatgactttcaacactcccatgaaaacaccgtagtctgcttttcctgaaaggtgactgtctaggatgctgaatgagccaccactccgtagctttatatattcagcaacatttccatcatagaatttcagcgttagaagggatcttagaggtagattatccaggccatcccctactgcttacattcccctccccctggccagttttatattttaatcacacattgaaaaattcattaacttattctgtataaaactgtcttttaagaattatcctttcaaaataaaaatgttattgttt

SEQ ID NO: 40 - DNA, 2295 bp, homo sapiens
aaaaccccagcaggttagcttctcattaaatagcttctcctgagggcagaccttgttaagaagaacaaaatgctctggcgtatttcaaaatggctccttttccccacccactaccagaggcatggataatcaccctgaggacctgtgagagatccaggagcttaaaaaaaattggggagcggggaagagggaatggctaggtccctctgacttgtccacactgatccttcaggtttacctatcctggtacttgttccattggaggcttcagcggctagtttctgctctgtggttaccaatgacacaggagctgagcttccaaaaatttattgaacaatctgacttactaggagaacttaaatatgacttcaatgaaaaagatgaattcagacatactgagacacaaaggccttttgtctttaactattatgaaaatgtccttgagaaaaatagcaagcgctaccaggcccttggccatttgcttgaacaatacatttatgagcttttggagaaagtgtgcaaattagaaaaagtatatatcccacctgaggctgataaagaagaaccaagaagcttctttttcatgagcgagaaagcattaacaaatcaccattctgctcttcttatccttcttcaagaccatggggtctttcgagctggtcagtggagtcaacaggcaataatacatcatggtctccaacatggaagtcagataccatgtattcaaatggcattgcaggcacactatgatgtaattgtgctaaaccccaatgataattttgtggaaccaaaggtggaaaaagagtggaaaggccttttaacacaaaatattgagtcatcttctctaaaaatggttcaaggtgggagctttttctctctccagcatcctcccaaatgcattccaaaaagatgcagcaacacccccgaagaacacacggcttacatatgggattacttcatttcaaagactgaaggcaaggatattgccttcattgtacatggttatggaggcttggtttttatggacttgcttgttcgtagaaggtgggaagtgatgagcaaagtatatgctgttgcacttatcgactctgaacatcacgtaggacaccagctgggaagtgatgtacaattattagcatggataaagcaccactgccgtgaatgggtgacaagtcctaagcctttggataaacctgcagctactgttttcaaaaaggaatttcctatggtttctgctggcacagaaaagtacatcttagccccttcctctagccttcagtcaatttttaagtactttaaaaaagctttaaaagccagaacaaccattaatttctctcgaatgccaatagtgactagaagctccacaaaaagaaagcaaagtgcttaaactacttttgtcatctaagatttttttgtccttctgcaactttgctaatacagattctggaagaaaaaagaacactttcaactcacacacaatatgatgttctggcttgaggtttgatttgttactttttattatttggtttttatgaggcagggtctgactttgctgcccagggtggtatggaaatctggcctcaagcgaacctcccacctcagcctcccaaagtgctgagattataggcattagccactgcacatggccatggccaggtttgttgcttttttttttttggaggaggaggaggaggagtctctgtcacccaggttggagtgcagtggcaccatctcagctcactgcaacctccacctcctggtttcaagcagttctcctgcctcagcctcccaagtagctgggactacaggcacatgccaccacgcccagctaatttttgtatttttactagagacgggctgttcgccaggctggtctaggactcttgacctcaggtgatccacccaccttggcctcccaaagtgctgggcttacaggcataagccactgcacctggccattttgttgcttttttgaaaagtgaacatattctctcttttgtagcctgttgatgaactgggaattcagtgtcatcattaatattttacagtgttagttaagtgtgaagatctttcttttaaaaagctgtggtttgatataatgacaacaaaatggcaattgataaaaattagatattgaatcaatctttgatttctataataataccatagtaaaattaaaagtgaacataaaaattaaacatcataagcaaactgcattctttgtgtgtttatgttttttgttaaaatttgttgtactccctgttcaccaggtctgaagaaaaataaattttaaat

SEQ ID NO: 41 - DNA, 2268 bp, homo sapiens
aatatcttgcatgttacagatttcactgctcccaccagcttggagacaacatgtggttcttgacaactctgctcctttgggttccagttgatgggcaagtggacaccacaaaggcagtgatcactttgcagcctccatgggtcagcgtgttccaagaggaaaccgtaaccttgcactgtgaggtgctccatctgcctgggagcagctctacacagtggtttctcaatggcacagccactcagacctcgacccccagctacagaatcacctctgccagtgtcaatgacagtggtgaatacaggtgccagagaggtctctcagggcgaagtgaccccatacagctggaaatccacagaggctggctactactgcaggtctccagcagagtcttcacggaaggagaacctctggccttgaggtgtcatgcgtggaaggataagctggtgtacaatgtgctttactatcgaaatggcaaagcctttaagtttttccactggaattctaacctcaccattctgaaaaccaacataagtcacaatggcacctaccattgctcaggcatgggaaagcatcgctacacatcagcaggaatatctgtcactgtgaaagagctatttccagctccagtgctgaatgcatctgtgacatccccactcctggaggggaatctggtcaccctgagctgtgaaacaaagttgctcttgcagaggcctggtttgcagctttacttctccttctacatgggcagcaagaccctgcgaggcaggaacacatcctctgaataccaaatactaactgctagaagagaagactctgggttatactggtgcgaggctgccacagaggatggaaatgtccttaagcgcagccctgagttggagcttcaagtgcttggcctccagttaccaactcctgtctggtttcatgtccttttctatctggcagtgggaataatgtttttagtgaacactgttctctgggtgacaatacgtaaagaactgaaaagaaagaaaaagtgggatttagaaatctctttggattctggtcatgagaagaaggtaatttccagccttcaagaagacagacatttagaagaagagctgaaatgtcaggaacaaaaagaagaacagctgcaggaaggggtgcaccggaaggagccccagggggccacgtagcagcggctcagtgggtggccatcgatctggaccgtcccctgcccacttgctccccgtgagcactgcgtacaaacatccaaaagttcaacaacaccagaactgtgtgtctcatggtatgtaactcttaaagcaaataaatgaactgacttcaactgggatacatttggaaatgtggtcatcaaagatgacttgaaatgaggcctactctaaagaattcttgaaaaacttacaagtcaagcctagcctgataatcctattacatagtttgaaaaatagtattttatttctcagaacaaggtaaaaaggtgagtgggtgcatatgtacagaagattaagacagagaaacagacagaaagagacacacacacagccaggagtgggtagatttcagggagacaagagggaatagtatagacaataaggaaggaaatagtacttacaaatgactcctaagggactgtgagactgagagggctcacgcctctgtgttcaggatacttagttcatggcttttctctttgactttactaaaagagaatgtctccatacgcgttctaggcatacaagggggtaactcatgatgagaaatggatgtgttattcttgccctctcttttgaggctctctcataacccctctatttctagagacaacaaaaatgctgccagtcctaggcccctgccctgtaggaaggcagaatgtaactgttctgtttgtttaacgattaagtccaaatctccaagtgcggcactgcaaagagacgcttcaagtggggagaagcggcgataccatagagtccagatcttgcctccagagatttgctttaccttcctgattttctggttactaattagcttcaggatacgctgctctcatacttgggctgtagtttggagacaaaatattttcctgccactgtgtaacatagctgaggtaaaaactgaactatgtaaatgactctactaaaagtttagggaaaaaaaacaggaggagtatgacacaaaaaaaaaaaaaaaaaaaaaaaaaaaaaaaaaaaaaaaaaaaaaaaaaaaaaaaaaaaaaaaaaaaaaaaaaaaaaaaaaaaaaaaaaaaaa

SEQ ID NO: 42 - DNA, 2069 bp, homo sapiens
atgctgccggactggaagagctccttgatcctcatggcttacatcatcatcttcctcactggcctccctgccaacctcctggccctgcgggcctttgtggggcggatccgccagccccagcctgcacctgtgcacatcctcctgctgagcctgacgctggccgacctcctcctgctgctgctgctgcccttcaagatcatcgaggctgcgtcgaacttccgctggtacctgcccaaggtcgtctgcgccctcacgagttttggcttctacagcagcatctactgcagcacgtggctcctggcgggcatcagcatcgagcgctacctgggagtggctttccccgtgcagtacaagctctcccgccggcctctgtatggagtgattgcagctctggtggcctgggttatgtcctttggtcactgcaccatcgtgatcatcgttcaatacttgaacacgactgagcaggtcagaagtggcaatgaaattacctgctacgagaacttcaccgataaccagttggacgtggtgctgcccgtgcggctggagctgtgcctggtgctcttcttcatccccatggcagtcaccatcttctgctactggcgttttgtgtggatcatgctctcccagccccttgtgggggcccagaggcggcgccgagccgtggggctggctgtggtgacgctgctcaatttcctggtgtgcttcggaccttacaacgtgtcccacctggtggggtatcaccagagaaaaagcccctggtggcggtcaatagccgtggtgttcagttcactcaacgccagtctggaccccctgctcttctatttctcttcttcagtggtgcgcagggcatttgggagagggctgcaggtgctgcggaatcagggctcctccctgttgggacgcagaggcaaagacacagcagaggggacaaatgaggacaggggtgtgggtcaaggagaagggatgccaagttcggacttcactacagagtagcagtttccctggaccttcagaggtcgcctgggttacacaggagctgggaagcctgggagaggcggagcaggaaggctcccatccagattcagaaatccttagacccagcccaggactgcgactttgaaaaaaatgcctttcaccagcttggtatcccttcctgactgaattgtcctactcaaaggagcataagtcagagatgcacgaagaagtagttaggtatagaagcacctgccgggtgtggtggctcatgcctataatcccagaactttgggaggctgaggcaggtggatcacttgaggtcgggagattgagaacatcctggtcaacatgggaaaaccccgtctctactaaaaatacaaaaaaattagctgggcatggtggcacatgcctataatcccagctactctggaggctgaggcaggagaatccttgaacccgggagttggaggttgcagtgagctgagatcacgccactgcactccagcctagcgacagagcaagactccatttaaaaaaaaaaaaaaaaaaaaaaagaagcaccttcaggctggagaagcagcgtagctaacacaagtccagtccttgtgatgtggctggtagttggggatggccaggctgaagcagagagtcctagagaaatctcgatacaagcttcaaagcaacacctagacactgctctagcggttgatcctggagataaaccaacaagagagagatggaagagaaatactaaatgaggtcaaagaagactcagaaaggttctgagcctggagatgagcagggaggcctcagggcttagacctttaatgataggggtttccctgcattggtttgacctgttgcctttttgatgtgctctgtttgttttcatgtgttgtcttgtctcccctgctaaactgggagctgccaggggtctgggtcttatctccttcctccatggtaccccacacaggccaggatgtggtttggtacccagcaatcagagattggcactccctcatacaggggaaagcaacctggtctagcaaattgaaaataaagatgataaaactctgaaaaaaaaaaaaaaaaaa

SEQ ID NO: 43 - DNA, 6174 bp, homo sapiens
agtgctgctggccgggagttgctctcaccgcagctggaaacagctgcccccgccccgcgcccctacccagactccgggtaaccgctcccacttcgcgcctctcggaattccagaactcgggtggccggcccctggaaagccgcagccggcgcgatgcattctgtagacctcaccctgctgggacggacctcctaatcttcagaaccgcgggccgcagggagttaaattgctgccttcctctccttctctcgtgcggttggtggcttgttttctaaaggaacgttttattcactttttagtattttctaccgggggcgcgctacccgcctgggtccagactctgctttgtaaacgggttttctatgtatgtatgtgtaggtatactttggacaccttacaacgcttgcgcctctccaacagaggcacgtcttgttattttgggcatcgttcttccccttccacttggtaccccgaacgcagtgtgactaaactccccactgccccttggacgccgatcgccttggggtgcaagtttggggtgcaaacgtctacttcgcaagagggcctgggaccgccccgccccgccccccggccgccagaggttggggaagtttacatctggattttcacacattttgtcgccactgcccagactttgactaaccttgtgagcgccgggttttcgatactgcagcctcctcaaattttagcactgcctccccgcgactgccctttccctggccgcccaggtcctgccctcgccccggcggagcgcaagccggagggcgcagtagaggctggggcctgaggccctcgctgagcagctatggctgcggcgatagccagctccttgatccggcagaagcggcaggcgagggagtccaacagcgaccgagtgtcggcctccaagcgccgctccagccccagcaaagacgggcgctccctgtgcgagaggcacgtcctcggggtgttcagcaaagtgcgcttctgcagcggccgcaagaggccggtgaggcggagaccagaaccccagctcaaagggattgtgacaaggttattcagccagcagggatacttcctgcagatgcacccagatggtaccattgatgggaccaaggacgaaaacagcgactacactctcttcaatctaattcccgtgggcctgcgtgtagtggccatccaaggagtgaaggctagcctctatgtggccatgaatggtgaaggctatctctacagttcagatgttttcactccagaatgcaaattcaaggaatctgtgtttgaaaactactatgtgatctattcttccacactgtaccgccagcaagaatcaggccgagcttggtttctgggactcaataaagaaggtcaaattatgaaggggaacagagtgaagaaaaccaagccctcatcacattttgtaccgaaacctattgaagtgtgtatgtacagagaaccatcgctacatgaaattggagaaaaacaagggcgttcaaggaaaagttctggaacaccaaccatgaatggaggcaaagttgtgaatcaagattcaacatagctgagaactctccccttcttccctctctcatcccttccccttcccttccttcccatttacccatttccttccagtaaatccacccaaggagaggaaaataaaatgacaacgcaagacctagtggctaagattctgcactcaaaatcttcctttgtgtaggacaagaaaattgaaccaaagcttgcttgttgcaatgtggtagaaaattcacgtgcacaaagattagcacacttaaaagcaaaggaaaaaataaatcagaactccataaatattaaattaaactgtattgttattagtagaaggctaattgtaatgaagacattaataaagatgaaataaacttattactttaaaggaaaggatttggagaattgaactcacaaactgatgttatatactcaatagcttaaactcatgataatgctgcgatgtgtggttttgcttgattttgtattttatttgggcatctggaattgacacaccattacattctgtttgcaggattttttttgtaaccatgaaattgaacatttccaaattataaactatgttaatacctataaaatatatagccaggaaccatttatcatcaagaaaagtgtaagaaattatttttgagatgtaatttaagattgttttatgtaaaaggaaaatcttgtatggcatcgaatagccttaatgagtttaattctttcacaaaaatgatttcaaattatcctagagtataacatttttatcaaagatattatttccggagttcttctttctttcttttttttttttttttagtaatttagcaaaaacattactgttctaatgctgaagtgacttttgccagtgccatgtccaggtggtgaggtataagttacttgctcttagcatttggtctgatttttttgctttgtggacacctttgagagtatccacaaagcaatgtctcaggtgtggacacctgagagcatgttttagaaagctttgtaccctgtcttgtggcaggaaagaaagaacaggggttttacataaggaaataagtcctaggaaattagtcaacgcaaattgcatttgcgtttgtaccttaccacagtcttatattgttttttaaactctgccatgaaatttggagacatgactgtgaaattcctaacttactatcttacaaagccagtagctaatttgttgctctatgtatgatcctgttacaagtccagtttgcaattcatttgtttcctagaacacagaagggtaccagtaatacactaaattttcaaggtgtgtagagaaataatatggaattagcagctatgactccaacagacaggattgtgtgagcagctgaaaggagcaaaaaagaactcagtgtaagagaaggcacatacatagttaagaatactaaagtatttttaaaaatcaaggaagaaataaatgttacacaatttgcattggaataaatagatctatttagtcctacaaatcaggagtggtgtagagacatccaaatttaaagaaaaaaaaacacaaaacagaatgttaaaaaatgtatgcagatttatggatattatcaatgagaagacatagcatgtaacttctcctatatctctactgtccagcatgtattgttccaaatatgactccctaaaatatatacactttgcagaagctctaggccctcacctcaaaccttgccattggttgccgtatttcaaggtcaatatagtttccctcactttacacaatcattattcttcaatagtggaccatatccttcaccaggtatcctatttctgttatctagaggttagcagaaaatgaaatgaaggaatttccctaagcagttgggaagaacaaattgtatgcatgtaggcaaagattttgaagatacatttgcaagagatatttgtttaaccaaaatatttggaaagtaacaaataaagacatttaaattttctaaaaatggacttgctcttctaggaaaagaatacccctggggcaaaaatataactctagctgtatttcttcttgtcactcttgattcaacttgattataaatacacctgtcactaccagaaccaaaaaaaaaaagaaaaaaatcccaagcacaaagcttattttatttgaaaaaaataaaaaagaaacttcaacactatgggacactggctcttttagcatgaaatgacttgagcttttgtagtgatgatacacatacacactcatcagtaaaacgatggtttcataaataacacaattgatgcaaatcataaaaatcaattacaattatgatttcatgacaaaatatatttaattaagtttgttatgaaaaaaatagagatatgaatcactaacaaaattcctccattttcagtggctattcatcatttatcatctagactcacatttgtctccttcctgatagcagttaagaaaaaattctaaccacacaatttgtatattgtttttctccgtattatgttaagcaaatgttcactgcagtaaaatgttttggaaattagctttgtcttatttccagtttagttcagagaattaattggaaacctgatttcttttacacataaacctgacaaaaaatgtagcttagagcaaagggtgaatgtttgcttaactcctgcttacttctcaagtacatgaaaactttaatagaatatgccagtattcactgagtttttaaaaatattaccatgtgtaaacatataatatccaacttcatccaaaaatatggttgagtttaagtactttgtttttcaggcttatttcaagtataataattctttgattttcattgttctgatttctgggtcttcaattcattcgtcacttttcctttttaagtaaaataagcttttttttttttttttttttttttttggagttgcattgggatttttcccaggaaaaaatatggcttttagtaatgctttgcaattggctacgcagatataaattaagatatgtttattctgagttcttattggaataagtttcaaaatcaacgagcttaagaatgaaaacaaaacttttgagagtctcacaaaatagctttctggtcaatacaccttacttgatttttaagctcgcagaataaagtatagaaacaaatggagctgaagttccatttgctaattcagagacttttgtgcttccgcaaattggagggcagcaagccatcctattctcatagtaatcgttttggctttgaaatttacatacaatttaatagcacatttttagccattatggattggcgcaataaagagatatcaatgtaatgcaatgtgatgctttatgggcctcattctaattcagaaagcttgtttaaaagaactaagactcttctgtttaataaaatagcaacaatctaatatctagattggtagtcctgcggtgccactagtgggagatgagagtattaagacaagagtaaggacaaggaaagacttaaaggttgcatattgaaaagtttggaattcctaatttgggagcactgatttcttggtgaagaagtaagtatgactacgttgccagtaattttttaaaaacatagacccagaaatagcaaatcgatttcaccctcataccttagtctacaaggccttgctcttgagaaggttttccatgatattgcttaatttcatctgcacaagatgagacacaaacataaaaattccctgctcattttaataccataaaaggctgaggttatttctctgtcataaaattgtaaatagcattttttaagtcaaaattacatttaaaacagtggattgttctacaaatatatatgtgtatatatacatatgcttctgaaataaggatatattatatgagtttttatttgatttgtggtctttagtcataggtaatcaaaaataaagagatttgaatgcaaaactttatacattaatgtacatttctaatgatggtacaaattgccactttataataaaaaagaaacaggtgggaataataatcaaagcacgtgttccttcagtactttggtgatttttaatcccccttgtgatgcacaggaaattattttttagttacaaaaagttatcttagaaatctatacttcccaatacagatttcatgttaagtcatatcaaattgagaatttgtggtgaaagaataggaaaaggatgctagatgctgatctttctttttcaggatttttcctggagcccaagttaaaaattcaatacttaaatctaagttaagtgaaaattaataatgttcagaatgatgtattgagctttagtaacagacggaagcaaaaaaaaataagaatatttaacattatgataatagccttaaaataatgtaataaaaattgcatcattaaatgttctattagttggaaagaatgagctgatgtttctttgtctttgctccaagtacaatttaaagacagtgacattcattttacttaaaattgttcaaaaagtccaaaacatactcccatggctagaattggtattagctccaatacaaggttaaatgttacaatcttaagaaattattgacactgaaatgtttagtaaacatgttgtatgagaaactaaacaaattaatgtttcatttttccattaaagcacagattattc

SEQ ID NO: 44 - DNA, 2162 bp, homo sapiens
cttcacctggggattgcaaaggaagtgagaacatccccgagcaagaccaaaaattgctgaataaacacaaacccccttgagaatcacgccaagaggtgctgcctcttcacctggggattgcaaagcctcaccgccatggacagcgtgcccctcatctgtgactacggctctggcttcagcaaggtgggatttgcaggaatggaaagcccaatgggcatgttccccactgtcctcgggaaacttcggcacgatgtgagtgatgtcggggtctcttccctgtggggtgctgctcatccagaggtggcctgctggcccggtcaaccccatcccctctgccacagggcggccaaggcaatctgctgagcggggcgtggtgggtgcgaacttgcctccacaaatccaagtcgggagcacctggcttgataacatacagatggccgggccacctagagtctctgcctcagctggtcgggggtgggagatggggtgggcaaggccttgcccctctcaccactcccagcatgcggcccactctgagagccgcaggcttagagagagcagcgatgtgtaaatcagtaaagtggatgcattgtgaaaaatcagtcttactgcccgtctcccatctctggctcttctcacattcagagaggtatggacacagagaaggagcaatttgcctttagggtaaacgggagtccattagggtgagtggcaatggacactcagcctccgtgataggaaggcagtaggagggcaggtggggaccgggacacaggccctccaagaggcccatctctgacatgccagcaagtggatcccacatcgccagatcttcctgtgtttcaagggaatttagaaacacaggtgtttctattgtggtaaagtatacacagtgtaaagctgtgttaactgcacagttcagtggcatcaagaacattcaccaccatctatctccagaacgttctcatcctcccaaacggaagctctggccccattaaaaaccaactgctcatccccctcccccggacaacacagtcgcgtcataactgaaactgggcgagtgggtctgagcctggctgcatgccaggtagggacagagatgcctcttctcccggaagaggaaccacctgctccgagaggtgacttctcgaatccacatggtgacaaagtggtgggggcaagaccccccagtgcaactgcgttcccagctcatgctctggatcatggagctcatcctctggaagttccaatcgtccgtggtagggagcagcgtcgtgacgtggaagatctcagatgtcgcaggacctcatggcgatcactcttgctctttgcagcacttggagcaaattattggcagtgtttctaattatccaagatacactggctcccggagctgtgacagaggagaaaatcccgtctccctctctaagaggataaaatgcacatggatgctgggagccagtggatttcctcctcgttgtccaagtggcagggatcatagcagggaccaccctggcaaatcgcaggtgcctgcactcgagctagccaaccagcttgctgcttggggattatggagctcagtggttaagagctggggcttcagggccggggagactgaggctccaatctcagccctgtcctcagcacatgcatgactcagcgcaagggtgctgctgtggcagaggcatctcttttgcataatgtgattgtccaaagtatgtatctcagagattcggcctgaaggttaaatgagatgagtgaatgtatgtttggtgcagtttctggaccatagggagtgtttagcaatgatgacgatagcagtgatgataacaatgactagtatattcgtgtattcgcttagaacaacagaaatgtggccatgtgcggtgggtcacgcctgtaatcccagcactttgggaggccgaggtgggtggatcacctgaggtcaggagtttgagaccagcctggccaacatggcaaaaccccgtctctactaaaaatacaaaaattagctgggcgtggtggcacacgcctgtaattccagctactctggaggctgaggcaggagaatcgcttgaacccgggaggcagagggtgcagtgagctgagatcgcgccactgcactccacctgggcgacagagtgagacttcatctcaaaaac

SEQ ID NO: 45 - DNA, 3007 bp, homo sapiens
gatacagcagcagctggtgctcctggccaggctgtgcgtgctctctctgcctctctctctcggactctctgctctctctctctgactctctcctctctctctgttggcctggtgaaatgttcttggctgtaggcacacagagccttggactcaaggctgttggagtcgaggacaccttgacttcggtcctggaggttgaaattctgcctctgagaagctaacagtcttcctgtggtcgccactcctccccagcagccccctccttgccaaggacggtccagaaggagccccactggggcctccccgctcagcaaagcagacctcacctcccactaccagcttgaagtcacagcagccagaggaaattctgccaccattttcccaggtctgcagcccctccagctgggaacctgctcctggagccatccctctgcaaacagagagcccagagtgcctcggggaaaattggctgaataaaagagcgatcaggacgccacggctccgcctgaagcgatggcccagccctacccccccgcccagtacccccctccgccacagaacggcatccctgccgagtacgccccgcccccaccgcaccccacgcaggactactccggccagaccccggtccccacagagcatggcatgaccctgtacacaccagcacagacccaccccgagcagccaggctccgaggccagcacacagcccatcgccgggacccagacagtgccgcagacagacgaggcggcacagacggacagccagccgctccacccctccgaccctacagagaagcagcagcccaagcggctacacgtctccaacatccccttccggttcagggaccccgacttgcggcaaatgttcgggcaattcggaaaaattttagacgtggagatcatttttaacgagcggggctccaagggttttgggtttgtaacttttgaaactagctcagatgctgaccgagcccgggagaagctgaatgggacgatcgtagagggacggaaaattgaggtcaataatgccacggcccgagtgatgaccaacaagaagacggggaacccctacaccaacggctggaagctaaatccagtggtcggcgcagtctacgggcctgaattctatgcagtgacggggttcccctaccccaccaccggcacagccgttgcctaccggggcgcacatcttcggggccggggccgggccgtgtataatacatttcgggctgcgccacccccaccccccatcccgacttacggagcggtcgtgtatcaggatggattttatggtgctgagatttatggaggctacgcagcctacagatacgctcagcccgctgcagcggcggcagcctacagcgacagttacggcagagtctacgcagctgccgacccgtaccatcacaccatcgggcccgcggcgacctacagcattggaaccatgtgaaaccttccaccgtttccttctcggaccatgaagggcaaaaacaaaaaaacaaaaaaaatcacaaaacaaaaaaaacaaaaaaagatgttaagatccaagcaacaaaaaaaaaaccaaccaaaccaagaggcatccaaccaagtccaagtcccgcgtcctggccacacgcccgcaccgagggagcacgccggcaggggcgccgaggagcggccccaggacaggacggccccaccgcgtcctggctggcagcacagtgggaacacgcccctccgtctcaggcagtgggggagttggaggggaaggggcctcccttgtgggacccgtggggggctctgttttccatccagtcttcctttcccagcccccaactcccaagacagacagtgtggagcccagcggcggcggagcaggcccgggcctgagcaggcaggcgctgctagcaagacttgatctttgtggccagctgtgccagggggccggcggggctgaggggtgcgggcagctttcatcccaggggctccactgggccccgtcaccctcctgtcgcgtcccctgcgtcccacctccctcctgcccggcagtcccgcccgtgcccccagcctggcgaggaagccgtccaacagtagccccggggccagctcccaacagaaagggctgacgtggctccaggactcaggggcgctccatgggaggacgaaggaagcccagccagccaggagccactcctcacacctccaagtgtggccaagtgggccctgaggccaaggacttacttgctcttcctggccatctctccctttctggaggaggcccggggcctgtgtacaccaaggctgacctcgtgctgcctgctgggacccagccctccctgccgctcccctgtgagcccagtccaccgtgggcgcccagggccagggacgggccagcgcccggctgcatcgcgaggttgggagtcacagtggctgtgggcctggacgggcacagccagagcaggggcccatgggaagggcaagggatggggaagcctgggccggccccttccctgctcccaaggcaggtgtccaggtggcgggagcagcaccaaggacagccaggcttacccggtgggaggagcaggagcagagcaggtggcagggaggaacccctggcgaggcagggagcactgaagtagggaagcagcaaaaaatacaggctcccaacgtggctccactgtctcatgaagtgtcaaaaatttaaaaatacacctcactttctattcagcatcagctattgaaatggaattctccttttctattcccgttgtacatagccccacgccctgcctccggctttgtcctctgtacagagccccctgtcccctctgctgttccggacccttttcttgcagcagctcaaccccccgactcactcagatccccaggactgcagccgagccccgggcttcctttcttaccattctgtatgcttccaaggtgtgaccattcaaactaacagtattattaagattattaataaagatttctttcttcaaaccaggaaaaaaaaaaaaaaaaaa

SEQ ID NO: 46 - DNA, 2509 bp, homo sapiens
cattgaggcaatttcttccctaatctattcctttgtgctgaacttttttaagtttgacactctagatatccgtctgcctcaagcaaaacagttgacagaaacccatgaacccatcatgccctgattcataggaagtaattactaataatcctaattctggttcatagtttgcttgtcagtaattacagctgcagttgaatgctttcagcattaaccatcaacccagagttgcagatccctcctcatctcagggaaatggaacttctcacatatcacagacaacttggaggaagctcagctggaccagaagagccagaaatcgggagcatgcaatggcagatcatcagggcaaggccactcaccagcagggaggcccagtgaatgcagagcaggtggcaacaggaaagactggaggccagtctgataggaaggcaaacaccagcaagaggcaattccgggatcatttatgggaaaccgaggcatggtctgcagaggcaaccgccccccccaccgtcacttccagagagatgaacggaaacctgatctctgagaacccaatcttctcaacaagttgtcaacatgctaataagcatagtgtcttactctgtagcaggtacttttactttatgtgttattaactctccatcttctcaacaatcatatcaagcaagtgctacttctatccccgatgtatgtataaatttgtccaaccatgtagctcataagtaaattaactgtaatttccaaacctagatacaccgaccctagaaactacactctcactactttcctacccaccaacacctcttaaagttgaggtgagaactaagtaacaagcacttatgagctgcaaatttcagtggaaagcactagtccaagcatttgtttgaaaccccccacacaatttgtacaacaaccctatgagatagtgtgtccgtcagcatttggtcacaaaaacaaaaggtattttgcatgttctaagtatccacagttctaatgcaggaaattagaggtttgcagtcttttggaaagacttagcaatgaattcagggaagccaccaggacctttctgcctgctgctgtatctatgcaagtgggagtcgacactcacccagaggccactgaacaccttaagggcctctgggagggtctctctggcttctcagccagcattcctgagataggtgattcttaggcttacctgaaagccattataaatctgttatctacctgcccacacacttgcctgcaaccaactcccttaaaacataatggctgctacttctctcattttaggaaaatctcacccaagtccctctccttggcagactctacacaaagccatacacaaaaagatgttctaagaaccatagttattggcttctccacagtacaggggagacttagaaggcagtaaagatgcatcaagttgagaacaaatgatctggtagaattaggtagaattcatatacccattttacagttgatgaaactgaggcagaggcacaaagcagttaatcaatttacgcctaatcacataactttagtaaatgataaagccatgattcaaatgtagagggactggctccataatctatgctcttgccattgcatgagattgttttcatggaagacttaactcagcacagtttggcacacccgttagtgctacactcattgtggtggctgggttttattcttattgatacatttcttgtgttactatatttgtttttctcataattagcacaactgggattgctcagccaatacccatggaatgttgaatacccccacccacagtctgccccatatctcaaggcaacctagacaggttttcttcctctaatgaattatcattatgacttagtccaagatttctaaataattaccagttccaaaaaaccagcatcctgagtatccacagatatgtgcatgaatacaagcatacatgcacacacatatgcacgcacacacacacactcagtctttatgagcagcaacgtaactgtatttcaatggatgcgattgatgagggcaagttccaggagcttcacccaggcaatcccggctggccaattattgcagacagcctgctcccacctattcaccacacagaacacatgtcaaaatgcactcggaaacaacactaggctgcagcacactgagaaggtgaggctgagcatcggacttgctgactttgggctgcccggcattgcccggaacacgtttgtggtccctgattccatctctagatactgcagggaaggctctgtaattggaaaatgctgcccaagcagaaagtctgccttgcttaataaacagggctctctgaagaagttcaaaattaccagaggagaaacacagcctagtgttaccatcagtgttctagaactggctgaaattgatcaaaggttttagctgcgatctttctcctacagctcatttaaccatgcaattaggcagttaagtagatgcaaaatatttaaaattaaagatgcttctcatc

SEQ ID NO: 47 - DNA, 8742 bp, homo sapiens
acgcccgcgccggctgtgctgcacagggggaggagagggaaccccaggcgcgagcgggaagaggggacctgcagccacaacttctctggtcctctgcatcccttctgtccctccacccgtccccttccccaccctctggcccccaccttcttggaggcgacaacccccgggaggcattagaagggatttttcccgcaggttgcgaagggaagcaaacttggtggcaacttgcctcccggtgcgggcgtctctcccccaccgtctcaacatgcttaggggtccggggcccgggctgctgctgctggccgtccagtgcctggggacagcggtgccctccacgggagcctcgaagagcaagaggcaggctcagcaaatggttcagccccagtccccggtggctgtcagtcaaagcaagcccggttgttatgacaatggaaaacactatcagataaatcaacagtgggagcggacctacctaggcaatgcgttggtttgtacttgttatggaggaagccgaggttttaactgcgagagtaaacctgaagctgaagagacttgctttgacaagtacactgggaacacttaccgagtgggtgacacttatgagcgtcctaaagactccatgatctgggactgtacctgcatcggggctgggcgagggagaataagctgtaccatcgcaaaccgctgccatgaagggggtcagtcctacaagattggtgacacctggaggagaccacatgagactggtggttacatgttagagtgtgtgtgtcttggtaatggaaaaggagaatggacctgcaagcccatagctgagaagtgttttgatcatgctgctgggacttcctatgtggtcggagaaacgtgggagaagccctaccaaggctggatgatggtagattgtacttgcctgggagaaggcagcggacgcatcacttgcacttctagaaatagatgcaacgatcaggacacaaggacatcctatagaattggagacacctggagcaagaaggataatcgaggaaacctgctccagtgcatctgcacaggcaacggccgaggagagtggaagtgtgagaggcacacctctgtgcagaccacatcgagcggatctggccccttcaccgatgttcgtgcagctgtttaccaaccgcagcctcacccccagcctcctccctatggccactgtgtcacagacagtggtgtggtctactctgtggggatgcagtggctgaagacacaaggaaataagcaaatgctttgcacgtgcctgggcaacggagtcagctgccaagagacagctgtaacccagacttacggtggcaactcaaatggagagccatgtgtcttaccattcacctacaatggcaggacgttctactcctgcaccacagaagggcgacaggacggacatctttggtgcagcacaacttcgaattatgagcaggaccagaaatactctttctgcacagaccacactgttttggttcagactcgaggaggaaattccaatggtgccttgtgccacttccccttcctatacaacaaccacaattacactgattgcacttctgagggcagaagagacaacatgaagtggtgtgggaccacacagaactatgatgccgaccagaagtttgggttctgccccatggctgcccacgaggaaatctgcacaaccaatgaaggggtcatgtaccgcattggagatcagtgggataagcagcatgacatgggtcacatgatgaggtgcacgtgtgttgggaatggtcgtggggaatggacatgcattgcctactcgcagcttcgagatcagtgcattgttgatgacatcacttacaatgtgaacgacacattccacaagcgtcatgaagaggggcacatgctgaactgtacatgcttcggtcagggtcggggcaggtggaagtgtgatcccgtcgaccaatgccaggattcagagactgggacgttttatcaaattggagattcatgggagaagtatgtgcatggtgtcagataccagtgctactgctatggccgtggcattggggagtggcattgccaacctttacagacctatccaagctcaagtggtcctgtcgaagtatttatcactgagactccgagtcagcccaactcccaccccatccagtggaatgcaccacagccatctcacatttccaagtacattctcaggtggagacctaaaaattctgtaggccgttggaaggaagctaccataccaggccacttaaactcctacaccatcaaaggcctgaagcctggtgtggtatacgagggccagctcatcagcatccagcagtacggccaccaagaagtgactcgctttgacttcaccaccaccagcaccagcacacctgtgaccagcaacaccgtgacaggagagacgactcccttttctcctcttgtggccacttctgaatctgtgaccgaaatcacagccagtagctttgtggtctcctgggtctcagcttccgacaccgtgtcgggattccgggtggaatatgagctgagtgaggagggagatgagccacagtacctggatcttccaagcacagccacttctgtgaacatccctgacctgcttcctggccgaaaatacattgtaaatgtctatcagatatctgaggatggggagcagagtttgatcctgtctacttcacaaacaacagcgcctgatgcccctcctgacccgactgtggaccaagttgatgacacctcaattgttgttcgctggagcagaccccaggctcccatcacagggtacagaatagtctattcgccatcagtagaaggtagcagcacagaactcaaccttcctgaaactgcaaactccgtcaccctcagtgacttgcaacctggtgttcagtataacatcactatctatgctgtggaagaaaatcaagaaagtacacctgttgtcattcaacaagaaaccactggcaccccacgctcagatacagtgccctctcccagggacctgcagtttgtggaagtgacagacgtgaaggtcaccatcatgtggacaccgcctgagagtgcagtgaccggctaccgtgtggatgtgatccccgtcaacctgcctggcgagcacgggcagaggctgcccatcagcaggaacacctttgcagaagtcaccgggctgtcccctggggtcacctattacttcaaagtctttgcagtgagccatgggagggagagcaagcctctgactgctcaacagacaaccaaactggatgctcccactaacctccagtttgtcaatgaaactgattctactgtcctggtgagatggactccacctcgggcccagataacaggataccgactgaccgtgggccttacccgaagaggacagcccaggcagtacaatgtgggtccctctgtctccaagtacccactgaggaatctgcagcctgcatctgagtacaccgtatccctcgtggccataaagggcaaccaagagagccccaaagccactggagtctttaccacactgcagcctgggagctctattccaccttacaacaccgaggtgactgagaccaccattgtgatcacatggacgcctgctccaagaattggttttaagctgggtgtacgaccaagccagggaggagaggcaccacgagaagtgacttcagactcaggaagcatcgttgtgtccggcttgactccaggagtagaatacgtctacaccatccaagtcctgagagatggacaggaaagagatgcgccaattgtaaacaaagtggtgacaccattgtctccaccaacaaacttgcatctggaggcaaaccctgacactggagtgctcacagtctcctgggagaggagcaccaccccagacattactggttatagaattaccacaacccctacaaacggccagcagggaaattctttggaagaagtggtccatgctgatcagagctcctgcacttttgataacctgagtcccggcctggagtacaatgtcagtgtttacactgtcaaggatgacaaggaaagtgtccctatctctgataccatcatcccagaggtgccccaactcactgacctaagctttgttgatataaccgattcaagcatcggcctgaggtggaccccgctaaactcttccaccattattgggtaccgcatcacagtagttgcggcaggagaaggtatccctatttttgaagattttgtggactcctcagtaggatactacacagtcacagggctggagccgggcattgactatgatatcagcgttatcactctcattaatggcggcgagagtgcccctactacactgacacaacaaacggctgttcctcctcccactgacctgcgattcaccaacattggtccagacaccatgcgtgtcacctgggctccacccccatccattgatttaaccaacttcctggtgcgttactcacctgtgaaaaatgaggaagatgttgcagagttgtcaatttctccttcagacaatgcagtggtcttaacaaatctcctgcctggtacagaatatgtagtgagtgtctccagtgtctacgaacaacatgagagcacacctcttagaggaagacagaaaacaggtcttgattccccaactggcattgacttttctgatattactgccaactcttttactgtgcactggattgctcctcgagccaccatcactggctacaggatccgccatcatcccgagcacttcagtgggagacctcgagaagatcgggtgccccactctcggaattccatcaccctcaccaacctcactccaggcacagagtatgtggtcagcatcgttgctcttaatggcagagaggaaagtcccttattgattggccaacaatcaacagtttctgatgttccgagggacctggaagttgttgctgcgacccccaccagcctactgatcagctgggatgctcctgctgtcacagtgagatattacaggatcacttacggagagacaggaggaaatagccctgtccaggagttcactgtgcctgggagcaagtctacagctaccatcagcggccttaaacctggagttgattataccatcactgtgtatgctgtcactggccgtggagacagccccgcaagcagcaagccaatttccattaattaccgaacagaaattgacaaaccatcccagatgcaagtgaccgatgttcaggacaacagcattagtgtcaagtggctgccttcaagttcccctgttactggttacagagtaaccaccactcccaaaaatggaccaggaccaacaaaaactaaaactgcaggtccagatcaaacagaaatgactattgaaggcttgcagcccacagtggagtatgtggttagtgtctatgctcagaatccaagcggagagagtcagcctctggttcagactgcagtaaccaacattgatcgccctaaaggactggcattcactgatgtggatgtcgattccatcaaaattgcttgggaaagcccacaggggcaagtttccaggtacagggtgacctactcgagccctgaggatggaatccatgagctattccctgcacctgatggtgaagaagacactgcagagctgcaaggcctcagaccgggttctgagtacacagtcagtgtggttgccttgcacgatgatatggagagccagcccctgattggaacccagtccacagctattcctgcaccaactgacctgaagttcactcaggtcacacccacaagcctgagcgcccagtggacaccacccaatgttcagctcactggatatcgagtgcgggtgacccccaaggagaagaccggaccaatgaaagaaatcaaccttgctcctgacagctcatccgtggttgtatcaggacttatggtggccaccaaatatgaagtgagtgtctatgctcttaaggacactttgacaagcagaccagctcagggagttgtcaccactctggagaatgtcagcccaccaagaagggctcgtgtgacagatgctactgagaccaccatcaccattagctggagaaccaagactgagacgatcactggcttccaagttgatgccgttccagccaatggccagactccaatccagagaaccatcaagccagatgtcagaagctacaccatcacaggtttacaaccaggcactgactacaagatctacctgtacaccttgaatgacaatgctcggagctcccctgtggtcatcgacgcctccactgccattgatgcaccatccaacctgcgtttcctggccaccacacccaattccttgctggtatcatggcagccgccacgtgccaggattaccggctacatcatcaagtatgagaagcctgggtctcctcccagagaagtggtccctcggccccgccctggtgtcacagaggctactattactggcctggaaccgggaaccgaatatacaatttatgtcattgccctgaagaataatcagaagagcgagcccctgattggaaggaaaaagacagacgagcttccccaactggtaacccttccacaccccaatcttcatggaccagagatcttggatgttccttccacagttcaaaagacccctttcgtcacccaccctgggtatgacactggaaatggtattcagcttcctggcacttctggtcagcaacccagtgttgggcaacaaatgatctttgaggaacatggttttaggcggaccacaccgcccacaacggccacccccataaggcataggccaagaccatacccgccgaatgtaggacaagaagctctctctcagacaaccatctcatgggccccattccaggacacttctgagtacatcatttcatgtcatcctgttggcactgatgaagaacccttacagttcagggttcctggaacttctaccagtgccactctgacaggcctcaccagaggtgccacctacaacatcatagtggaggcactgaaagaccagcagaggcataaggttcgggaagaggttgttaccgtgggcaactctgtcaacgaaggcttgaaccaacctacggatgactcgtgctttgacccctacacagtttcccattatgccgttggagatgagtgggaacgaatgtctgaatcaggctttaaactgttgtgccagtgcttaggctttggaagtggtcatttcagatgtgattcatctagatggtgccatgacaatggtgtgaactacaagattggagagaagtgggaccgtcagggagaaaatggccagatgatgagctgcacatgtcttgggaacggaaaaggagaattcaagtgtgaccctcatgaggcaacgtgttatgatgatgggaagacataccacgtaggagaacagtggcagaaggaatatctcggtgccatttgctcctgcacatgctttggaggccagcggggctggcgctgtgacaactgccgcagacctgggggtgaacccagtcccgaaggcactactggccagtcctacaaccagtattctcagagataccatcagagaacaaacactaatgttaattgcccaattgagtgcttcatgcctttagatgtacaggctgacagagaagattcccgagagtaaatcatctttccaatccagaggaacaagcatgtctctctgccaagatccatctaaactggagtgatgttagcagacccagcttagagttcttctttctttcttaagccctttgctctggaggaagttctccagcttcagctcaactcacagcttctccaagcatcaccctgggagtttcctgagggttttctcataaatgagggctgcacattgcctgttctgcttcgaagtattcaataccgctcagtattttaaatgaagtgattctaagatttggtttgggatcaataggaaagcatatgcagccaaccaagatgcaaatgttttgaaatgatatgaccaaaattttaagtaggaaagtcacccaaacacttctgctttcacttaagtgtctggcccgcaatactgtaggaacaagcatgatcttgttactgtgatattttaaatatccacagtactcactttttccaaatgatcctagtaattgcctagaaatatctttctcttacctgttatttatcaatttttcccagtatttttatacggaaaaaattgtattgaaaacacttagtatgcagttgataagaggaatttggtataattatggtgggtgattattttttatactgtatgtgccaaagctttactactgtggaaagacaactgttttaataaaagatttacattccacaacttgaagttcatctatttgatataagacaccttcgggggaaataattcctgtgaatattctttttcaattcagcaaacatttgaaaatctatgatgtgcaagtctaattgttgatttcagtacaagattttctaaatcagttgctacaaaaactgattggtttttgtcacttcatctcttcactaatggagatagctttacactttctgctttaatagatttaagtggaccccaatatttattaaaattgctagtttaccgttcagaagtataatagaaataatctttagttgctcttttctaaccattgtaattcttcccttcttccctccacctttccttcattgaataaacctctgttcaaagagattgcctgcaagggaaataaaaatgactaagatattaaaagtatttgaatagtaaaaaaaaaaaaaaaaaaa

SEQ ID NO: 48 - DNA, 6373 bp, homo sapiens
cttgaacctttgtcacccctcacgttgcacaccaaagacataccctagtgattaaatgctgattttgtgtacgattgtccacggacgccaaaacaatcacagagctgcttgatttgttttaattaccagcacaaaatgccatcagtctgggacgtgatcgggcagaggtgtactcacagtagtgtaaatactgctgtaaatagttgtctgatggtggctttgacagtgagctagcttctgagttttcccttctttttatactgttttctgtgctggcttttttgaatcttcctaatttttcatctctttaacaaactcctatgaagttgaaaccgggaagtttgctctaacatttccagagaaggtattaagtcatgatgcaggaatctgcgacagagacaataagcaacagttcaatgaatcaaaatggaatgagcactctaagcagccaattagatgctggcagcagagatggaagatcaagtggtgacaccagctctgaagtaagcacagtagaactgctgcatctgcaacaacagcaggctctccaggcagcaagacaacttcttttacagcagcaaacaagtggattgaaatctcctaagagcagtgataaacagagaccactgcaggtgcctgtgtcagtggccatgatgactccccaggtgatcacccctcagcaaatgcagcagatccttcagcaacaagtcctgtctcctcagcagctacaagcccttctccaacaacagcaggctgtcatgctgcagcagcaacaactacaagagttttacaagaaacagcaagagcagttacatcttcagcttttgcagcagcagcagcaacagcagcagcagcaacaacagcagcaacaacagcagcagcaacaacaacaacaacagcagcaacaacagcagcagcagcagcaacagcagcagcagcagcaacagcatcctggaaagcaagcgaaagagcagcagcagcagcagcagcagcaacagcaattggcagcccagcagcttgtcttccagcagcagcttctccagatgcaacaactccagcagcagcagcatctgctcagccttcagcgtcagggactcatctccattccacctggccaggcagcacttcctgtccaatcgctgcctcaagctggcttaagtcctgctgagattcagcagttatggaaagaagtgactggagttcacagtatggaagacaatggcattaaacatggagggctagacctcactactaacaattcctcctcgactacctcctccaacacttccaaagcatcaccaccaataactcatcattccatagtgaatggacagtcttcagttctaagtgcaagacgagacagctcgtcacatgaggagactggggcctctcacactctctatggccatggagtttgcaaatggccaggctgtgaaagcatttgtgaagattttggacagtttttaaagcaccttaacaatgaacacgcattggatgaccgaagcactgctcagtgtcgagtgcaaatgcaggtggtgcaacagttagaaatacagctttctaaagaacgcgaacgtcttcaagcaatgatgacccacttgcacatgcgaccctcagagcccaaaccatctcccaaacctctaaatctggtgtctagtgtcaccatgtcgaagaatatgttggagacatccccacagagcttacctcaaacccctaccacaccaacggccccagtcaccccgattacccagggaccctcagtaatcaccccagccagtgtgcccaatgtgggagccatacgaaggcgacattcagacaaatacaacattcccatgtcatcagaaattgccccaaactatgaattttataaaaatgcagatgtcagacctccatttacttatgcaactctcataaggcaggctatcatggagtcatctgacaggcagttaacacttaatgaaatttacagctggtttacacggacatttgcttacttcaggcgtaatgcagcaacttggaagaatgcagtacgtcataatcttagcctgcacaagtgttttgttcgagtagaaaatgttaaaggagcagtatggactgtggatgaagtagaataccagaagcgaaggtcacaaaagataacaggaagtccaaccttagtaaaaaatatacctaccagtttaggctatggagcagctcttaatgccagtttgcaggctgccttggcagagagcagtttacctttgctaagtaatcctggactgataaataatgcatccagtggcctactgcaggccgtccacgaagacctcaatggttctctggatcacattgacagcaatggaaacagtagtccgggctgctcacctcagccgcacatacattcaatccacgtcaaggaagagccagtgattgcagaggatgaagactgcccaatgtccttagtgacaacagctaatcacagtccagaattagaagacgacagagagattgaagaagagcctttatctgaagatctggaatgagaactgacttgtgaaacctcagcgtgaagggacatatcactgaccttcataaccactccacaaccatgaatatttgacaaatttttactgtgactatttattaagcatggataaaggagacagccctaaaggaacttactaagccagccctttgggattcagtaccaacaggcaaattgcttgttttcttcttcttcttcttctttttttttttttttttagaaaaaaagacaaaaactgattttcttgaaaaaaaaaaatgaactgttctttctataatggctttgcccatttaaaaaatgtggctcttaagggttcatgaaatgactgaatatgaggatacatgtcctgtagaaagcaaatgcgcctcatatactgccaaaaatagtgttagtttcattaatgtgaattttccagcattcagtagttgtaatgttagaaacaattgctggtcaagttcaacttgttgctattgtttttaatttgcacaggagtagtatcagaaattagtgtcactgcttgtatctagctgaattttaaacaacagaacattagttttttatgttggtgccaccaactgtaaatgacataagttagttattacaaaacacagtaattagactgttgcaaccatctaaaaccttaggcttccagtctgtgctgttagtgttaagatgtaaagtgcaatcctaagctaacattatctgtgcaagcaccatagaaacatttgcatatctgcatagatcttacaactgtactctttacctccttgtgataaagctttgtctacctgcaaacacagtcaaaggctacagctgcaaaccaaagccaactctaaccatggccaagagctcaaggacagaagcagccacatgctttggtcagccttctgtaacttcaattagtacaaaggaaccttttccatgaactacctgctgttttctgatgacctctgggatcttttcatttagccctaaacaaagaaacaaatatgacaaaaaccacaactaaaaaatgttaattcagtcacagagtaatcttctgaggccaaaagtccatctaaatgcaatgaagatttgctttcattaaagacagaggtgaggacaaaatccgcagtggaagttatgatatgctagaaagcaacaaatgtggatcactgaccaaaacgattatgtacttgatgcaaatgcagattgcatattgttatatatatagtactttgtgtttttgttttccctcattcagtcagttattttcagtggtgaatacatgttgttagaagatgtcttgtatggtcttaatctttgttgtgtactatttttttatagtcttaagttataatgaaaaaacaaaaagtaggaaccaaacataaaaggtctagtaaagccaaaaattaatttcatattgattttaaagtgatctagctgagtttttacactgaaagcaaagattatagcaattgtagtccatggtatttattttcagtcaaaccaaagttacatataattctgcctctgcttatacgggatattaacactaacaatacactcccttcaaagacttgcacaggccaaattgttggaatgctggttttcttgacaattccaaaccccaaaactatgataatgagttatgatgtagttgaaaatagcatagtcagatgtttgcttaaaacctagaaacttaacatgttgcttttcatgtgctgtgccaagtcttgataatactttttcccccaaccaagggacctcataacctgattatggttattgctttacaaacagttttgacagaaggtggctgctagagcttaacatacgttcccgttccatgtgatggaaccggttcttgcaaactaagctcatcattgattctttgctgaagtcagcaaatagagttagagagatacccagtcatctatcacaccaaataaaaggacataacggctttcaaaagggttttcccacttacccaaaaggctttctgaaagcttctacctctgcaaaaaaaaaaaaagaaaaaaaaaaaaagaaaaacattagaacaattatggcagattgcatgaaacgtgagaacgtcacagtaactgctacttttcattatgtttgtctttgggtcatgatcaacgaaccggaagtttacaatatggtattaaaagaaagatgggtatggtgaaagatggttttcagtcatctaggatcctactgtaaggattatctgaaaggaaaaatgggtctttcaggtgcatgttcaaaaggctttgagggactggaagtaactgcgagagttgtaccatcagaagggtggcctaagactacaatgctaaagtatgcatacctcagttagaaaacttttgaaaggaagtctcagccacagaatgcatatacctgtagagttttgcatgggttttatatgaatacaattttaaaaaatagctgcttgcacattataccagaaaaacctccaaaactgcaattgctttgaaaatagattttaggttttttggagtttcctgaaatgcttggtctgtattttgataattgtgcatattatgtaaaaatgttggtggacccataaatgaccagactttttctaagaaaaatgttgctttaatgcatttcatgaatttttactcttatatcattgcttgctagtaatagcaaatctgcttttctgcatctgctttgcgtagctattgtaaggctttgaactaatgtatgtatttattgcttgaacttctgtgcataccttataaagcataatgtctgacaatttaaatggctcatgtattcttgcttctatcataagctgattatggggactatgatcttttgtatacagcaaattttaaactgtagcacaaacatctgtttatgtattggtggaatatacctgttttatttatcttttttgaggtaaactaatttttgatacttttcattactgtgtactatgttcatactttgaattctctgacgttagaagtcatggttgagaattgtaacagctgttattcgttctgtattcatggctttcactgctgaataaaataaaggaccaaacctaggatttgaaagaaaactgtctacctctaacaccagggagttatcagattttattttacatagttttagtctacaaagacacaattgcttaaacctagtgggcttaaggcttatattctatgtggttggattcgtggcacagttgtactatttgaaaatcaattaaaattttatgtgaatgttacaagtatttggtagaattaccactaactgggttttctttagataactcagatatggagaaaatgtcatcagcattctgtgtctacagctgcttaacttcataagaatgcatttctttgtgattagggaatcgaagaatagtcagctaggaatagagctacagaagtacacttacataaaccatcctggactttaatgtccctgggcagattcagtcgcaaaatccaatatgatattttgtaaagttttcaagttggacatttacatttttgagaattttgagacttcatcttacacatgccagtattaacacacatttggacaatagctttattaagtctataaagctattgaaaggaacatggcttacccttgttatttcactagttcaggttgcaacgaaaggtttttttgtccatgaacacttggcatatcttacttagcaaaaaagaaggatgtacattttactatagaattaatgtatgaacagtgtgtcactgctgttggatgtaaaaatgtatatgaaaccatttcattcacttgattacatttctgaagtataaataaaaaaatctaattctttttgacccatttataaaaaaa

SEQ ID NO: 49 - DNA, 2441 bp, homo sapiens
agagtgccgggagcgcctgattggcggccctcccggcgcctgcaggccccgccccggctgcggaggctcagtcacagccctcccctcctcgctccctcccctcctctccccgcccagttcttctcttcccgtctgaggtggcggtcggtctcgccttgtcgccagctccattttcctctctttctcttcccctttccttcgcgcccaagagcgcctcccagcctcgtagggtggtcacggagcccctgcgccttttccttgctcgggtcctgcgtccgcgcctgccccgccatgaatgaggagtacgacgtgatcgtgctgggcaccggcctgacggaatgtatcctgtcaggtataatgtcagtgaatggcaagaaagttcttcatatggatcgaaacccttactacggaggagagagtgcatctataacaccattggaagatttatacaaaagatttaaaataccaggatcaccacccgagtcaatggggagaggaagagactggaatgttgacttgattcccaagttccttatggctaatggtcagctggttaagatgctgctttatacagaggtaactcgctatctggattttaaagtgactgaagggagctttgtctataagggtggaaaaatctacaaggttccttccactgaagcagaagccctggcatctagcctaatgggattgtttgaaaaacgtcgcttcaggaaattcctagtgtatgttgccaacttcgatgaaaaagatccaagaacttttgaaggcattgatcctaagaagaccacaatgcgagatgtgtataagaaatttgatttgggtcaagacgttatagattttactggtcatgctcttgcactttacagaactgatgattacttagatcaaccgtgttatgaaaccattaatagaattaaactttacagtgaatctttggcaagatatggcaaaagcccatacctttatccactctatggccttggagaactgccccaaggatttgcaaggctaagtgctatttatggaggtacctatatgctgaataaacccattgaagaaatcattgtacagaatggaaaagtaattggtgtaaaatctgaaggagaaattgctcgctgtaagcagctcatctgtgaccccagctacgtaaaagatcgggtagaaaaagtgggccaggtgatcagagttatttgcatcctcagccaccccatcaagaacaccaatgatgccaactcctgccagatcattattccacagaaccaagtcaatcgaaagtcagatatctacgtctgcatgatctcctttgcgcacaatgtagcagcacaagggaagtacattgctatagttagtacaactgtggaaaccaaggagcctgagaaggaaatcagaccagctttggagctcttggaaccaattgaacagaaatttgttagcatcagtgacctcctggtaccaaaagacttgggaacagaaagccagatctttatttcccgcacatatgatgccaccactcattttgagacaacgtgtgatgacattaaaaacatctataagaggatgacaggatcagagtttgactttgaggaaatgaagcgcaagaagaatgacatctatggggaagactaacagcagtacatgttattatgtaattaggacacatttaaaatttggcaaataatgcatataatgaaatcaatattgtaaggcctgcttttgtaatgaaaatggagagaatgaagagcgctgtgccagtaaatactccccttcacctttctaattattaacttgttttcatggagtggctattcagcattggcagttaccacattctgttcaatttaaccaaactggctttttttttttctagtgaagttaaacaaacattgggataccgacacagacaacttgagacagtttttttaatcttttaatcagtgtagctatgtgctgctgctgctcaagagctggatccatacaggttgtgtgtcatctgtcctcttgaggttcaggagattctaaattgaatattccacggtttgggacagcatccggaagttttccctatgactttatattttgtattatgtcaaatgttatggcagggcccaaatagcatagccacaagtttggtttatgtgggcataaaattctaaccaaaccccagacatagggagtcatttggagaaagcctgtatgtggtgttttaacctaataaagttgatgagagagaaggggagaggaagcgaacataaagcgggtcaagtgtagtgcatcttttgtatctcaggcgtggcttcttcagtggaccaagctgcaatgcagtattgacttgacagagcctctacttctgtctcaaaatggctccaaatgatttctgtactgcaaaataaagccaaattctggaaactaaaaaaaaaaaaaaaaaaaaaaaaaaaaaa

SEQ ID NO: 50 - DNA, 855 bp, homo sapiens
gccagctctggggtctcggcaggtggtccacaacatgacctctgagttcttcgctgcccagctccgggcccagatctctgacgacaccactcacccgatctcctactacaagcccgagttctacacgccggttgatgggggcactgctcacctgtctgtcgtcgcagaggacggcagtgctgtgtccgccaccagcaccatcaacctctactttggctccaaggtccgctccccggtcagcgagatcctgttcaatgatgaaatggatgacttcagctctcccaacatcaccaacgagtttggggtgcccccctcacctgccaatttcatccagccagggaagcagccgctctcgtcaatgtgcccgacgatcatggtgggccaggacggccagcccccaagccatgctgatcacactcccatgccccaggccatcatctacaacctctggttcggctatgacgtgaagcgggccgtggaggagccccggctgcacaaccagcttctgcccaacgtcacgacagtggagagaaacattgaccaggcagtgactgcagccctggagacccggcaccatcacacccagatcgcgtccaccttcatcgctgtggtgcaagccatcgtccgcacggctggtggctgggcagctgcctcggactccaggaaaggcggggagcctgccggctactgagtgctccaggaggacaaggctgacaagcaatccagggacaagatactcaccaggaccaggaaggggactctgggggactggcttcccctgtgagcagcagagcagcacaataaatgaggccactgtgccaggctccaggtggcctccctgccctgtcaaaaaaa

SEQ ID NO: 51 - DNA, 1898 bp, homo sapiens
agccgacctactggtgtcatggcagccccaaagacagcagctgtggggccgttggtgggagcggtggtccagggcaccaactccactcgctttctggttttcaattcaaaaacagcggaactacttagtcatcacaaagtggaattaacacaagagttcccaaaagaaggatgggtggaacaagaccctaaagaaattcttcagtctgtctacgagtgtatagcgagaacgtgtgagaaacttgacgaactgaatattgatatatccaacataaaagctgttggtgtcagcaatcagagggaaaccactgtaatctgggacaagttaacaggagagcctctctacaatgctgtggtgtggcttgatctaagaacccagactactgttgaggatcttagtaaaaaaattccaggaaatagtaacttcgtcaagtctaagacaggccttccactcagcacttacttcagtgcagtaaaacttcgttggatgcttgacaatgtgagaaacgtccaaaaggctgttgaagaaggtagagctctttttggtaccattgattcatggcttatctggagtttgacaggaggagttaatggaggcgtgcattgtacagatgtaacaaatgcaagtaggacaatgctttttaatatccattctttggaatgggataaagagctctgtgacttttttgaaattccaatggaccttcttccaaatgtcttcagttcttctgagatctatggcctaattaaaactggagccctggaaggtgtgccaatatctgggtgtttgggggaccaatgtgctgcattagtaggacaaatgtgcttccaggagggacaagccaaaaacacctatggaacaggttgcttcttactgtgtaatacgggtcgtaaatgtgtgttttctgaacatggccttttgaccacagtagcttacaaactaggcagagagaagccagcatattatgcactggaaggttctgttgctatagcaggtgctgttattcgttggctaagagacaatcttggaattatagagacctcaggagacattgaaagacttgctaaagaagtaggaacttcttatggctgttactttgtcccagccttttcagggttatatgcaccttattgggagcccagtgcaagagggatactctgtggcctcactcagtttaccaataaatgtcatattgcttttgctgcattagaagctgtttgtttccaaacccgagagattttggaagccatgaaccgtgactgtggaattccacttcgtcatttgcaggtagatggaggaatgaccaacaacaaagttcttatgcagctacaagcagatattcttcatattccagtaataaaaccctttatgcctgaaacaactgcactaggagctgccatggcagcaggggctgcagagggagtaagcgtttggagccttgaaccccaggctttgtcagttctcaggatggaacgatttgaaccacagatccaggccacagaaagtgaaattcgttatgccacatggaagaaagccgtaatgaagtcaatgggttgggttaccagtcagtctcctgaaggtggtgatccttctatcttctctagtctgcctttgggattttttatagtgagtagcatggtaatgctaattggagcaagatatatctcgggtgtgccataataataccagctatggagtcccaagatgtaaacattttacataatgaaagcatatagcagttctgcctcttaatataatgacactattatagactctgattttgtttataaaccacttgctacatgacccatgaaaaccctagacttgtgacctgaaataaagaaaatacgttagaagagcactgtaaaaaaaaaaaaaaaaaaaaaaaaaaaaaaaaa

SEQ ID NO: 52 - DNA, 4262 bp, homo sapiens
gtcagctgcgcgcgaaccagggctgggaggctcggctggaggtgtgaccagggcagggactgacctggcccggaacagaagcgcgcagagtcccatcctgccacgccacgaggagagaagaaggaaagatacagtgttaggaaagagacctccctcgcccctacgccccgcgcccctgcgcctcgcttcagcctcaggacagtcctgccgggacggtgagcgcattcagcaccctggacagcaccgcggttgcgctgcctccagggcggccccgggctgctcctgctccgcagagctacgccctccccccgggtgccccggaccctgcacttgccgccgctttcctcgcgctgctctggaccttgctagccggctctgcacctcccagaagccgtgggcgcgccgctcagctgctccatcgcctcactttcccaggctcgcgcccgaagcagagccatgagaaccccagggtgcctggcgagccgctagcgccatgggccccggcgaggcgctgctggcgggtctcctggtgatggtactggccgtggcgctgctatccaacgcactggtgctgctttgttgcgcctacagcgctgagctccgcactcgagcctcaggcgtcctcctggtgaatctgtctctgggccacctgctgctggcggcgctggacatgcccttcacgctgctcggtgtgatgcgcgggcggacaccgtcggcgcccggcgcatgccaagtcattggcttcctggacaccttcctggcgtccaacgcggcgctgagcgtggcggcgctgagcgcagaccagtggctggcagtgggcttcccactgcgctacgccggacgcctgcgaccgcgctatgccggcctgctgctgggctgtgcctggggacagtcgctggccttctcaggcgctgcacttggctgctcgtggcttggctacagcagcgccttcgcgtcctgttcgctgcgcctgccgcccgagcctgagcgtccgcgcttcgcagccttcaccgccacgctccatgccgtgggcttcgtgctgccgctggcggtgctctgcctcacctcgctccaggtgcaccgggtggcacgcagacactgccagcgcatggacaccgtcaccatgaaggcgctcgcgctgctcgccgacctgcaccccagtgtgcggcagcgctgcctcatccagcagaagcggcgccgccaccgcgccaccaggaagattggcattgctattgcgaccttcctcatctgctttgccccgtatgtcatgaccaggctggcggagctcgtgcccttcgtcaccgtgaacgcccagtggggcatcctcagcaagtgcctgacctacagcaaggcggtggccgacccgttcacgtactctctgctccgccggccgttccgccaagtcctggccggcatggtgcaccggctgctgaagagaaccccgcgcccagcatccacccatgacagctctctggatgtggccggcatggtgcaccagctgctgaagagaaccccgcgcccagcgtccacccacaacggctctgtggacacagagaatgattcctgcctgcagcagacacactgagggcctggcagggctcatcgcccccaccttctaagaagccctgtggaaagggcactggccctgccacagagatgccactggggacccccagacaccagtggcttgactttgagctaaggctgaagtacaggaggaggaggaggagagggccggatgtgggtgtggacagcagtagtggcggaggagagctcggggctgggctgcctggctgctgggtggccccgggacagtggcttttcctctctgaaccttagcttcctcacccttgttctggggtcatggcgatgcttcgagacagtgggtagggaagtgccctgtgtggcatatggtactcgtgggcgtgctataagtgactgctgttcatgtgggtgaggtggtcactcttgctcagggtctgttgtgcagcccagatggacacctgtttctccaacctggttattagcattgttccgatttgttctcggcattgcccaggtttgggagataaatgccggggcggagtctggttgggggctcccagagttcacatctgatagtctgtggtcaggacctggcaggcacgggcagtccctgggacatgcccatctctggaagcctaggggtccccagctccaggcctgtccgctgtgactgcctgtgtgggcacgcagatggagcctgtctcctgccttcctttccatggtttgccaggggtttggcatcttgactgcggaagctgtggagtctgtgtgctcagagccttttctggtgaagatatcatcagagcatgtgacctctgtttcctccccctgaaggccaccgctgggcctctggatcttagacatgagacggtcaagagattgaagtagtagccagggcccaggtgtccagagagggtggcctgggatggggagggcccttgctccccaacagcagtgctgggggagccaagagaaggtggagcatccctgagtagtggtgtgcatcacccccagtttagtaatcacggggtgccattccccggtgggagcacccaccatcaatgtcattgaatgtccccatgggacagtgttgaggacttttgtgacatctgtcctatttcacagctcagggaaaggtgcacagtgcacacgggcacccggtggagaggtgtgtgtgtgaatgagtgagcgagtgaatgaatggacacgattctctcttcagcctctgtcattgctgttttcttcaaggcccagggccatcccctgcagaggtagggtgggctgcaagacctcaggcccctgcctcatgggactctctgatgggcttcaaccgtgggctcttgcaggcatggagcctgtatcatgacaccttacacccaaggccagcaatgcaaggagagtatggacatcaaattctttccttccagaggctgaattcttcaaagacacacgcggtcgtcacttgctcttggcattaacggtggagaacccagctgaggtggcttcacagattcttccccaaaaacacaggtgttattattatacttttaaaaaactttttgagacagggtctgactctgttgcctaggctagagtgcagtggtgcaatctcagctcactgcagcctccacctcccatgctcaagccatcctcccacctcagcctcctgagtagttgaggacacaggcacgggacaccatgcctggctaatttttgtatttttttttgtagagatggcggtctcactttgttgcccaggctggtcttgaattcctgagcttaagtgatcctcccacctcagcctcccaaagtgctgggattacaggtgtgagccaccacacccagccaaaaccaggtgttatttgctgactcaccaatgcctcccccaaaaggataaatttaaaggtgtgtataacccatgaagtgtaattcaaataaaacaaattatcgtttggaataataacaactataggtatgtggtcaggaagcagttaaaaacattaaaatacagacctggccagttcaatccaacccaggggttccaagcaggaggtggggcaggtgggcgtcatgccctgattcacagagggcacaggtgggtgtcatgccctggttcacagagggcacgtgaactcgagaccgtgctgcaccccggtgcccctgtgcttataagggagggcacgtgcacagcagaagcaggttgttccccatttaaagttctggagcccaggctgtgagctccttggctgagccctctcctgtccctgggagctccccaggtgcgaggagcctgccagccagtggggcctacactctgtgttattgcatctccgccaggctaaaagccttggtcactactttagagccactcaaggaaacgcgtgcaccctgccctgctggaaggcaccatggttagagggaggcacactgtttcttagagacggggactgcttgctgtcatgtttcgccttcctcggcagctccatggaatgttctggagcaggcatcttagggcattccctccgcacttctctgccagcccatgtggctcccacactgggctatcccttgccttaggcttgtggccttttttttttttttttttttaatttgaaaaatatttttcatgtgcacttaaacgtgttgtggaatgatgctgggtctcaagaatgctgtgaatcaataaacattttattcagaaaaaaaaaaaaaaaaaa

SEQ ID NO: 53 - DNA, 1530 bp, homo sapiens
gttgcgcgccgtggcggcctctgtgcagtcgccggttccggaggagggcccaacccggctgggtgggtgggaagtgtggctggtaacctggcagccgcggagagagagaagattataaatggcagagccatttaactgtggttagctgttggattctgatactttcttaaaaatacgttcttgcaccaacatcttcattgggaacagttcagaaaaagcaaagaggagagccaacattcacatttaccatggctataccaataacagtgcttgactgtgacctcttgctatatggccgtggtcaccggacattggaccgttttaagctggatgatgtgactgatgaatacttgatgtccatgtatgggtttccacggcagttcatttattacttggtggagctcttgggggcgaatctttctaggcctactcagcgatccagggctattagcccagagacacaggtccttgcagcattgggtttttatacctcaggttccttccagactcggatgggagatgccattggaatcagtcaggcgtctatgagtcgttgtgttgccaatgtcactgaagcacttgtggaaagggcctcacagttcattcgctttccagctgatgaagcctccattcaggctctgaaggatgaattctatgggttggcagggatgccaggggtgatgggggtggttgactgtatccatgtggccatcaaggcaccaaatgctgaagacctctcctatgtgaaccgaaaaggcctgcattctttaaactgcctgatggtgtgtgacattagagggacactaatgaccgtggagacaaactggcccggcagcctacaggactgtgctgtgctgcagcagtcttccctcagtagtcagtttgaagcgggtatgcacaaagatagctggcttctgggtgacagttccttctttcttcgaacctggctcatgaccccacttcacattcctgaaactccagcagaatatcgctataacatggcccattctgcaactcacagtgtgattgagaagactttccgaaccctctgctcccgattccgctgcctggatggatccaagggggcactgcagtactcaccagagaaatccagccatatcatcttggcctgttgtgtcctccacaacatctccctggagcatgggatggatgtttggtcctctccaatgacaggacccatggaacagcccccggaagaggagtatgagcacatggagtccctggacttagaggctgaccgtattcgtcaggagctaatgctcactcattttagctaatgtagaaggtggagaggagggatacttcccaggagttgtgacagactttcctcctcatcaccttttacacagttccatcatctagcatgactgagtatacagatacttgtcataaactgacatttaatatgtgtgttttggtaaggttggggctatgccagaatatcttgattcatttgcatatgcattaattaaactgaaaccaagacagcggctccctactaaaaaaaaa

SEQ ID NO: 54 - DNA, 2306 bp, homo sapiens
ataaatagcaacctatgctaggggttgctagcaccagccatttcccctactcacacctgtgcagtgtgataaagatagtagaattagcctgcagttgtggtccaaccagataaaacttttaggcgggaagtcaagtgacaggcaaacttgtgtgtgtggtttttttttttaagtgttagatgtttttgatattttaaaaaagcatctaggctgcttgtggaagtcagaccaaaatagcaggaaggtattgcagcaagatggatttgggaaaggaccaatctcatttgaagcaccatcagacacctgaccctcatcaagaagagaaccattctccagaagtcattggaacctggagtttgagaaacagagaactacttagaaaaagaaaagctgaagtgcatgaaaaggaaacatcacaatggctatttggagaacagaaaaaacgcaagcagcagagaacaggaaaaggaaatcgaagaggcagaaagagacaacaaaacacagaattgaaggtggagcctcagccacagatagaaaaggaaatagtggagaaagcactggcacctatagagaaaaaaactgagccacctgggagcataaccaaagtatttccttcagtagcctccccgcaaaaagttgtgcctgaggaacacttttctgaaatatgtcaagaaagtaacatatatcaggagaatttttctgagtaccaagaaatagcagtacaaaaccattcttctgaaacatgccaacatgtgtctgaacctgaagacctctctcctaaaatgtaccaagaaatatctgtacttcaagacaattcttccaaaatatgccaagacatgaaggaacctgaagacaactctcctaacacatgccaagtaatatctgtaattcaagaccatcctttcaaaatgtaccaagatatggctaaacgagaagatctggctcctaaaatgtgccaagaagctgctgtacccaaaatccttccttgtccaacatctgaagacacagctgatctggcaggatgctctcttcaagcatatccaaaaccagatgtgcctaaaggctatattcttgacacagaccaaaatccagcagaaccagaggaatacaatgaaacagatcaaggaatagctgagacagaaggcctttttcctaaaatacaagaaatagctgagcctaaagacctttctacaaaaacacaccaagaatcagctgaacctaaataccttcctcataaaacatgtaacgaaattattgtgcctaaagccccctctcataaaacaatccaagaaacacctcattctgaagactattcaattgaaataaaccaagaaactcctgggtctgaaaaatattcacctgaaacgtatcaagaaatacctgggcttgaagaatattcacctgaaatataccaagaaacatcccagcttgaagaatattcacctgaaatataccaagaaacaccggggcctgaagacctctctactgagacatataaaaataaggatgtgcctaaagaatgctttccagaaccacaccaagaaacaggtgggccccaaggccaggatcctaaagcacaccaggaagatgctaaagatgcttatacttttcctcaagaaatgaaagaaaaacccaaagaagagccaggaataccagcaattctgaatgagagtcatccagaaaatgatgtctatagttatgttttgttttaacaatgctcaaccataaagttgtggtccaatggaacatacagcttaatagtttatgcgtgattttctcaaaatattgtaaaacttttgacaatgctcattaatattattttttctatttgtagaccatatctgaaagaaataacattttttaaggctctaccacatagacaatatcatgctagaatgtgtgtgtgtgtgtgtgtgtgtgtgtgtgtatgtatgtataggtcggggagaggatagtggtgggaacagacaaataaggaagcggggaggactggataattggttttcccccctaagaacatttatttacgtcttaagagcagataagtgactaagactgaacacatacattttgtggagtatatagttttcttgtaaatgctgttcaattattaatgtaacagtagcatcaaaattttattcaggctttagttgactcttttggtcagttttaacaattctccttaaaagatattttggagtgatgaatgtagtttacttttgtatttgaattttgattttctatttttattttttaaatattgtatttgtgcacaatgtacattaaatcattattacatgcttaaa

SEQ ID NO: 55 - DNA, 500 bp, homo sapiens
gtggttctcgtgttgctgcaatttgatgcgaggagatgtctggacgagggaagcagggaggaaaagcacgcgccaagtctaagtctcgctcttctagagcgggtttgcagtttcccgtaggccggatccatcgtctgcttcgtaagggaaactatgcagagcggataggggcaggcgcaccagtgtatttggcggcagtgttagagtatctcacagcagaaatccttgagctggcaggcaatgcgtctcgcgataacaaaaaaactcgcattattccccgccacctgcagctagcgatccgcaatgatgaggaactcaataagcttttgggcggcgtgaccattgcccagggcggagtcctgcctaacattcaggcagtgctgctgcccaagaagactgagagtcaccaccataaagcccaaagcaagtaacttaaggttgtcattggtaaaaagacttctgtgtcagaaaaaacaaaaggctcttttcagagccaccta

SEQ ID NO: 56 - DNA, 1989 bp, homo sapiens
agctgggccaatgaacggcggcgggaggtgaaatccggttctaaccggtccggggctcccagcgctataaaaactttataaaccccccggagcccgagcagtgtgaagaagaggcgagaacgacccccggaccgaccaaagcccgcgcgccgctgcatcccgcgtccagcacctacgtcccgctgccgtcgccgccgccaccatgcccaagagaaaggctgaaggggatgctaagggagataaagcaaaggtgaaggacgaaccacagagaagatccgcgaggttgtctgctaaacctgctcctccaaagccagagcccaagcctaaaaaggcccctgcaaagaagggagagaaggtacccaaagggaaaaagggaaaagctgatgctggcaaggaggggaataaccctgcagaaaatggagatgccaaaacagaccaggcacagaaagctgaaggtgctggagatgccaagtgaagtgtgtgcatttttgataactgtgtacttctggtgactgtacagtttgaaatactattttttatcaagttttataaaaatgcagaattttgttttactttttttttttttttaaaagctatgttgttagcacacagaacacttcattgttgtttttgggggaaggggcatatgtcactaatagaatgtctccaaagctggattgatgtggagaaaacacctttcccttctagttttgagagacttcctcttggctcccaggaggagggattccctgactttgacacacatggccaccttggcacaaaagccttgtggtatagaaaaacaaatttgtttttatgtcctcttctccctttccatcgttcagcatagacttaactcccttaagcccagacatctgttgagacctgacccctagtcattggttaccagtgtgtcaggcaatctggactttccagtgatgccactgagatggcacctgtcaaaagagcagtggttccatttctagattgtggatcttcagataaattctgccattttcatttcacttcctgaaagtcagggtcggcttgtgaaaagttgttaaacaacatgctaaatgtgaaatgtcaaccctcactctaaactttccctgttcagagcatcagatgaagacttcattgggttttatagtggctttctgatttttggtagtccattgaagaagggagtttgaaagttgttgtatactgttaacgattgtctgcccatgtcctgcctgaaataccatgattgtttatggaaagtatctttaataaagctggatacagtttggcttggaatgctgcctctgatcttttcccacaagtggggtaacctggtttatccaagtctcttggaacagggtacgttctgctttgaggtactccatgtacagtctaatgatgatctttcactgatttatagtcagcttccaaaacacacagtgctaggtgcagttaggaaggattccaggagtagacttagctgatggtgaaaggctgggagtatggagtgatttctgtacttggttatgcagcattccctgcagtgtttgttttttgcatgactccgaatacatgaagtgtattaaatgcagatttttggtagatctgcggttttggctgggtagctgacaggagcctctctacttccatctgcatttgcaacttctataaaattagcaaattaatagactcatgtcagagagtgtctctgtgaatgtgtacacagttgtccatttgtaaggtagatgacactttgctcctaagtagacctgcaaacaaagacaatggggtctttcctgattcctttagtttggagatgcagagaaccccacgtttctctaagtgaaatggcaagaagttatttgttagaatatggaactggtaacaaattcatgtttgcaccttgaatttgctttcacagacctggctgtattgttggacaggaataaagtaaattggagactaaaaaaaaaaaaaaaaaaaaaa

SEQ ID NO: 57 - DNA, 1144 bp, homo sapiens
aagaagggtgagaatgccccctgggctgaccaaagcccacgggccactgcatcccttgccaagtgcctacatcccactgccattgctgccatcatgcccaagacaaagattgaaggggatgctaaaggagataaagccaaggtgaaagacgaaccactgagaagatccgcgaggttgtctactaaaccttccaaagccagagcccaagccaaaaaaggctctcgagaagaagggagagaaggtacccaatggaaaaagggaaaagctgttgctggcaaggaggggaataaccctgcagaaaatggagatgccaaaacagaccaggcacagaaagctgaaggtgctggagatgccaagtgaagtgtgcacatttttgataactatgtgcctctagaggtgactgtagagtgtgaaatactctttttatcaagttttataaaaatgcagcattttgtttcactttttttaaaagctatgttgttagcacacagaacaattcattgttgtttttgggaaaagaatgtccgtgaagctggattgatgtggagaagacacctttcccttctagttttgagagacttcctcttggctcccaggaggagggatttcctgactttgacacacatggccaccttgtcacaaaagccattaaaaacaaattcatttttatgtcctcttctccctttcaacctttcagcatagacttaactcccttaaacccagacacctgttgggatgtgaccccccagtaattggtcaccagtgtgtcaggcaatctggactttccagtgatagcactgagatggtgctccttaaaagagcagtggttccatttgtaggttgtggatctttggataaattctgccattttcattttacttcctgaaagccagggttggctcatgaaaaggtgttgaacaacatgctaaatgtgaaatgttaaccctcactctaaactttctctgttcagagcatcagatgaagacttaattgagttttatagtggctttctgattttgggtagtcaactgaagaagggagtttgaaagttgttgtgtactgttaatgattgtctgcccaagttctgcttgaaataccatgattgtttatggaaagtacctttactaaagctggataaagtttg

SEQ ID NO: 58 - DNA, 1927 bp, homo sapiens
acctaagcgatgaaatccaaaggtgaatcttttggttggtgattttgatgatagccacaaagcaagcaggctgtatggtagccttgaaaaccaacaggccacaatcacagtgaaaacctcaggttggcagccactggaggatacaaaatgagtttggatctccttcaatgccccattcccagagaactgtcattatttgacctgctggtagttccctaaaggacgtgcaaggatgtttttatttgactggacacttgaagcttgccctgtatgaacagcccccatcttcccatgcttgtcaaaaatcagaggcaactaacactgcggcttcctgagagtctcactctgtcacccaggctggagagcaattgcacaaacacttggctcactgcagcctcaacttcttgtcctcaagtgatcctcccaccttagcctcctaagtagctgggaccacagggaactccggatgtgactcctgttacatgaaaatggaagaggtcagagttgtccaagagggaggccagccacatccaggcagggcccccatggtcagaaccctgctagagccatcaaggtcccagagctcccaagatggtggcaagccttttgttctctgaccagaggttcctggcctcacggattccaaggaatggaaccttgggccatgcgtgcacttgattttgcagatgagtctggaagtgttagttgcaaagatatgcatttacttctctggctacaaaaaagaatagaaatgcacaaagcagagcagtgtgaagaagaagaggcgatgacccctagaccgaccaaagcccgtgctccactgcccagtgcctatgtcccaccactgtcgctgccaccctgcccgagagaaaggctgaaggggatgctaaaggagataaaaccaaggttaagtaggaactgcagagaagatccacaaggttgtctgctaaacctgctcctccaaagccacagccgaagcccagaaaggcctctgcaaagaagagagagaaggtacctacagagaagaagggaaaagctgatgctggcaaggaggggaataaccctgcagaaaatggagatgccaaaacagactaggcacagaaagctaaaggtgctggagatgccaagtgaagtgtgtgcatttttgataactgtgtacttctggtgactgtacagtttgaaatactattttttaatcaagttttataaaaatgcagattttgtttagcttttttttttttttttaagctatgttagtacacagaatacttcattgttgttttggggagaagggccatatgtcactaatagaaagcccctgaagctggactgatgtggggaaaacaccttttccttctggttttgagagacttcctcttgggtcccaggaagagggattccctgactttgatacacatggccaccttggtataaaagccttgtggtatggaaaaacaaattcgttttttatgtcctcttctctgtttctacctttcagaatggacttaaatcccttaaacccagacatcttctgggacctgacccccaataattggttaccagtgtgtcaggcaatctggactttgccctcaaaagagcagtggttcctgtttctaggttgtggatcttcagataaattctgtcattttcctttcacttcctgaaagccagggtcggttcatgaaaagctatgaaacagcatgctaaatgtgaaatgtcaaccctcactaaactttgccggttcagagcatcagatgaagacttcattgggttttacagtggctttctgatttttggtagtccattgaagaagggagtttgaaagttgttgtatactgttaacgattgtctgcccatgtcctgcccaaaataccatgattctttatggaaattatctttaataaagctggatacagtttggcttggg

SEQ ID NO: 59 - DNA, 2435 bp, homo sapiens
aggggtggagagaaaagaggggagggatggggggaggggaaacaggagcgaggtgtctccctagctcgctgcctctggcaagtggagtttttaaaaagctccagcagatcatgtcatgacgacttcgctgctcctgcatccacgctggccggagagccttatgtacgtctatgaggacagcgcggcggagagcggcatcggcggcggcggcggaggaggaggcggcggcacgggcggagcggggggtggctgcagcggagcgagccccggcaaagccccgagcatggatggtctgggcagcagctgcccggccagccactgccgcgacctgcttccgcaccccgtgctgggccgcccgccggctcccctgggcgcccctcagggcgccgtctatacggacatcccggccccggaggcggcgcgccagtgtgccccgccgcccgcaccccccacctcgtccagcgccaccctgggctacggctaccccttcgggggcagctactacggctgccgcctgtcgcacaacgtgaacctgcagcagaagccttgcgcctaccacccgggcgataaatacccggagccgtcgggcgccctgcccggtgacgacctgtcctctagggccaaggagttcgccttctaccccagcttcgccagctcctaccaggcgatgcccggctacctggacgtgtcggtggtgcccgggatcagcgggcacccggagccgcgtcacgacgccctcatccccgtcgaaggctaccagcactgggctctctccaatggctgggacagtcaggtgtactgctccaaggagcagtcgcagtccgcccacctctggaagtctcccttcccagacgtggttcccctgcagcccgaggtgagcagctaccggcgcgggcgcaagaaacgcgtgccctacactaaggtgcagctgaaggagctagagaaggaatacgcggctagcaagttcatcaccaaagagaagcgccggcgcatctccgccaccacgaacctctctgagcgccaggtaaccatctggttccagaaccggcgggtcaaagagaagaaggtggtcagcaaatcgaaagcgcctcatctccactccacctgaccacccacccgctgcttgccccatctatttatgtctccgctttgtaccataaccgaacccacggaaagacgctgcgcgggtgcagaagagtatttaatgttaaggaaagagaagaaccgcgccgcccggaggcagagaggctccatggccgtgctgctgggccatccccaactccctatcccatccccagcctccacccccatccagatgggactcacgtggcttcaacagctttggaaatgggtcccgagtgggccgtgcgaggaaggctgtcgacctctactcctccttgcgctcaccttgccagaaagtctggtggcagcgcagagcccaatcattccaaccaaagcagggttggggaatcccgaatggccccaattcttgcctcatcctatgaccaggcttttagaggaccttccctaagggcgcagcttcggagcaggatctgtccagctcatactttccttcgctgtccctcccgcactccttaggcaagatttcccagtaaagattttctgtgcgtattttaaaagtcgtgttaatactcatgataattattagggacctggcagcgtgattggagtatggatgtttccgtaaaagctggaattccgtaaaagcattgacgcagcccctacactccatcccaaccaagaaactgcatttcctggggccaggtgggagctgcctttgccccactgcctcccctgttctgctctctcagtcaacatgtggaaatccaaggaggacaaagactccagccacgctgctaaatagggctcctctctcctctctctctctctaggtggtaaggttggggattagtccaggtacagaagcagaacttttttctaaggataaacatctcttccaaggggatggagagtgggtccctcaacaaagtccctgtccagtcacctttccatcagggcactagcccaggaatgactcctcacactttcacctttactgatttccagaggaaagctagaggatctagttcaagaggcaagaagatctggccctcaattagctagatgtagatgctgcctaacagttccctcctcaaaggccaccttggtgctgtgggggccccttgcctcttcccttcccactggtgcattacaaaacagtgttcttttgaaatgttcatcaggaataggcttttttaaaaaatgttgtgtatctgtatatagtattgtgatgtctgaatgacaatgtactgaatgcaaaaaggaaaaaaacccacaaacatgtttttaaaataaaatatctttttttgccttgaaaaaaaaaaaaaaaaaaaaaaaaaaaaaaaaaaaaaaaa

SEQ ID NO: 60 - DNA, 1803 bp, homo sapiens
gcacaggcaccgcgtggttctcacaaccagcagctcggctcactgagacccggtggtccagacgctgctcctggctggggtggcgctgcagggagaaccgcgagctctcaggggtcggcgggtgacttctttccggaagaaagcgaggaacgcgctctgcggggtgagccggactccccaactccggacgatcagcccaggactgagagccccgaagtccccaaccacaagtaagcggccccagaaggacaagtctaggtcgccgtccagagcgccatggccgcgcccgcccttcgtttgtgccacatcgccttccacgtgcccgccgggcagcccctagcccggaacctgcagcgcctcttcggcttccagcccctggcttcgcgggaggtggacggctggcggcagctagccctgcgcagcggcgacgcggtctttttggtgaacgagggcgcagggtctggagagccgctgtacggcctggatccgcgtcacgccgtgcccagcgccacaaacctgtgcttcgacgtggcggacgccggcgctgcaacccgggagctggcagcgctgggctgcagcgtgcctgtccctcccgttcgcgtgcgggacgcgcagggtgccgccacttacgccgtggtcagctcgcctgccggcatcctcagcctgaccttgctggagcgcgctggctaccgcggacccttcctacccggcttcaggcccgtgtcctctgcgcctggccccgggtgggtcagccgcgtggaccacctgaccttggcctgcacccccggcagctcccccacacttttgcgctggttccacgactgcctgggcttttgccacttgccgctgagcccaggtgaggatcccgagctgggcctcgaaatgacagcagggtttgggcttgggggactgaggcttacagccctgcaggcccagccgggcagcattgtccccactcttgttctggctgagtcccttccgggggcgacgacacgacaggaccaggtggagcagttcctggcccggcacaaggggccaggcctgcagcacgtggggctgtatacgcctaacattgtggaggccactgagggggtggcaactgctggaggccagttcctggctccccctggggcatactaccagcagccaggaaaggagaggcagatccgagctgcagggcacgagcctcatctgcttgctcgacaggggatcctgctagatggtgataaaggcaagtttctgcttcaggtcttcaccaagtccctttttactgaggacactttcttcctggagctgattcagaggcagggggccactggctttggtcagggcaacatcagagctctgtggcagtccgtacaggagcaatctgccaggagccaggaagcctaaggatgcccagggctgggtgcagccagctgtcctgcagctctggggagaccagcacagaactgaggaacatctgcaggaggcccaactagtgaaaggctttgcctccggggggcaggtgtgacttccatttcatcagtgcctgccagaagctgtgtctctcattgggctccaaagaggtgggattttttaaaactaaaacatttcttatatacagtctataataaatatgtaagatacaaagaacaataaaagaattacacactaggaaatagaacataaccaatactttcgagtcctccctgtgtcccgctgtgattctatttcctcccacccactcctcaaatcctgtcattattagccctttgcttttctgtattgtttcactccgtatgtaacataaccctaaataaa

SEQ ID NO: 61 - DNA, 971 bp, homo sapiens
aacaaagttcagtgactgagagggctgagcggaggctgctgaaggggagaaaggagtgaggagctgctgggcagagagggactgtccggctcccagatgctgggcctcctggggagcacagccctcgtgggatggatcacaggtgctgctgtggcggtcctgctgctgctgctgctgctggccacctgccttttccacggacggcaggactgtgacgtggagaggaaccgtacagctgcagggggaaaccgagtccgccgggcccagccttggcccttccggcggcggggccacctgggaatctttcaccatcaccgtcatcctggccacgtatctcatgtgccgaatgtgggcctccaccaccaccaccacccccgccacacccctcaccacctccaccaccaccaccacccccaccgccaccatccccgccacgctcgctgaggctgctgtcgccggtgcctgtggacagcagctgcccctgccctcccatctgttcccaggacaagtggaccccatgtttccatgtggaaggatgcatctctggggtgaacgaggggaacaatagactggggcttgctccagctgcatttgcatggcatgccccagtgtactatggcagcagagaatggaggaacactgggtctgcagtgctgaagggtttggggagtggagagcaagggtgctctttcggggctggacagcccgtcttgtgacagtgactcccagtgagccccagaaatgacaagcgtgtcttggcagagccagcacacaagtggatgtgaagtgcccgtcttgacctcctcatcaggctgctgcaggcctctggcgggcagggcactgggagaggccctgagaatgtccttttggtttggagaaggcagtgtgaggctgcacagtcaattcatcggtgccttagtccaagaaaataaaaaccactaagaagctttaaaaaaaaaaaaaaaaaaaaa

SEQ ID NO: 62 - DNA, 4578 bp, homo sapiens
atttcaaagcacaccatgccggcagcacttggaggtggtatgtgctgggaaactgaccaacagtttagtcagactgagtcacttcaaggaggggagtggagacagcagtgggtgccagatgacacggagctgtcggcttccgtgtgcattttcttttgatagtagccgtagagaagttgtccgccaggcagccctcaatgggatttttcatttaagaaaaatcactctgctcgtgcactgatggagaaatgaactacaagaagcaagccctgaggtctggagacaggaagctactgaaaccagccagggagtgagccataactggtggctgctcttgcgccaatgagcctccccaattcctcctgcctcttagaagacaagatgtgtgagggcaacaagaccactatggccagcccccagctgatgcccctggtggtggtcctgagcactatctgcttggtcacagtagggctcaacctgctggtgctgtatgccgtacggagtgagcggaagctccacactgtggggaacctgtacatcgtcagcctctcggtggcggacttgatcgtgggtgccgtcgtcatgcctatgaacatcctctacctgctcatgtccaagtggtcactgggccgtcctctctgcctcttttggctttccatggactatgtggccagcacagcgtccattttcagtgtcttcatcctgtgcattgatcgctaccgctctgtccagcagcccctcaggtaccttaagtatcgtaccaagacccgagcctcggccaccattctgggggcctggtttctctcttttctgtgggttattcccattctaggctggaatcacttcatgcagcagacctcggtgcgccgagaggacaagtgtgagacagacttctatgatgtcacctggttcaaggtcatgactgccatcatcaacttctacctgcccaccttgctcatgctctggttctatgccaagatctacaaggccgtacgacaacactgccagcaccgggagctcatcaataggtccctcccttccttctcagaaattaagctgaggccagagaaccccaagggggatgccaagaaaccagggaaggagtctccctgggaggttctgaaaaggaagccaaaagatgctggtggtggatctgtcttgaagtcaccatcccaaacccccaaggagatgaaatccccagttgtcttcagccaagaggatgatagagaagtagacaaactctactgctttccacttgatattgtgcacatgcaggctgcggcagaggggagtagcagggactatgtagccgtcaaccggagccatggccagctcaagacagatgagcagggcctgaacacacatggggccagcgagatatcagaggatcagatgttaggtgatagccaatccttctctcgaacggactcagataccaccacagagacagcaccaggcaaaggcaaattgaggagtgggtctaacacaggcctggattacatcaagtttacttggaagaggctccgctcgcattcaagacagtatgtatctgggttgcacatgaaccgcgaaaggaaggccgccaaacagttgggttttatcatggcagccttcatcctctgctggatcccttatttcatcttcttcatggtcattgccttctgcaagaactgttgcaatgaacatttgcacatgttcaccatctggctgggctacatcaactccacactgaaccccctcatctaccccttgtgcaatgagaacttcaagaagacattcaagagaattctgcatattcgctcctaagggaggctctgaggggatgcaacaaaatgatccttatgatgtccaacaaggaaatagaggacgaaggcctgtgtgttgccaggcaggcacctgggctttctggaatccaaaccacagtcttaggggcttggtagtttggaaagttcttaggcaccatagaagaacagcagatggcggtgatcagcagagagattgaactttgaggaggaagcagaatctttgcaagaaagtcagacctgtttcttgtaactgggttcaaaaagaaaaaaataataaaaataaaagagagagagaatcagacctgggtggaactctcctgctcctcaggaactatgggagcctcagactcattgtaattcaagctttccgagtcaagtgattgacaactgaagagacacgtggctagggttccactggagaattgaaaaggactcttgagccctcctggaatggagctgtataactgtgcagagactttatccatgccaatagttgctgtccccttccaggggtcaccttgagaggcatgacagctgttccacaggggctatcccttctcagaaaacttctcttctgagcctctttaacagctttctccagaaccagtgtctgaaccaccctggaaattctgccttattatttcttactcaaacatgtttagagtggatagaaaattatgcagcttgcacacccatcgtctttaaccccaaatttcctttggctattaaaaaagtggtggcaaaagacatcctcaaaagaaagagaaatgaaatatttttgaatggttgcacgttaaaaattaaaagaaggaatgggggcagaatgccatatttttgagggctgtactaggtttatctcatttaagccccacaacaccccacaggagggtaattttctaactctagtttgcagaggagcaaattgaggttcagcaaggtgagagaggtacccaaggtcacatagctagttatgtgagaaagttagagtacagatcctctggggtttcagcttattgtagcatattttctccgaaaggcaaaaatgtgcccttttggccgggcatggtagctcaagcctataatcccagcatgttgagaggctgaggtgggcagatcatttgaggccaggagttcaagaccagtctggccaatatggagaaaccttgtctctactaaaaacacaaaaattatctgggcatggtggggcatgcctgtagtcccacttacttgggaggccgaggcacgagaattgcttgaacccgggaggtggaggttgccgtgagccaagatcacgccactgcactccagcctgggcaacagagcaagactctgtctcaaaaaaaaaaatacaatattttaacaatgtgccctcttaagtgtgcacagatacacatacacggtattcccaagagtggtggcagctcaaaatgatatgtttgagtagacgaacagctgacatggagttcccgtgcacctacggaaggggacgctttgaaggaaccaagtgcatttttatctgtgagttctgttgtgtttgtcaaaaagtcattgtaatctttcatagccatacctggtaagcaaaaactagtaaagacataggaacatgtagttttacttggtgtttatgttgcaatctggttgtgatttatattttaaagcttggtgctaaaccacaatatgtatagcatatggagtgcctgtacaagctgatgttttgtattttgtgttcctctttgcatgatctgtcaaagtgagatatttttacctgcctaaaatatgatgtttaaaagcatactctatgtgatttatttatttctacctttctgagtctcttggactaagaagatgttttgaaatgtaccatcaaatgttaacagagtttgatatgggctttctctttggtttctcatcacatttgtaaatgtcttttcaaaaggatttactttttgtaaaaagcttcattctcactctgctttgcatcccccaaacttcttgttcaaaacggggggagtttaggagactttaatcccggtttcagaagctgcagctggtctgtttccaggtcagaaaccattgttcagaagacctccctgtgagagagttgctcctcagggtccctcaggaccaaagaacactcgaaaagagcacttcacacagacaagtggctaagtgtccattatttaccttgaacaatcaaggcaactagtggagagaactgattgtgagctctgcctctgggtcagagagacctggatttgagtctgacaagaacaagaaatggtcaataaatataaattaccagcgtctaaggaacaaggtctatgcattattgtatacagtgtctctagtgcttgtatagtgtctggtatacagagggcactcctatgcatttttaaaacatgctgagcacataccatgtgccaggctttgtgttttatctaatgttatctaatggtattggtgccattatgtaatgttgcctttacaacaacctcatgagggagatttccatctttacaaataggcaaactgaggcccagagagattgaggaactgctccgaggtctgattctggaatgtgcttcctttccactttatcaatctgctcttcgtactcctgtctgaacgatggaaattaatttttgaatgtataaaagacaacagactatgatacagaaatgtcagccccagcccactaagaaagccccagcccatcagtggctaatggctttaataaattggtcatttggctaaaaaaaaaaaaaaaaaaaaa

SEQ ID NO: 63 - DNA, 5416 bp, homo sapiens
actccacctcggtccacagctctcttcctgcgcagttcgcctctgcagcctctgcggggaagtgccggggctgctcgaggctcagttcttaggactgcaaggaggcagccccggcgtgcggcggtgcgcacagtctagagtggccagggcgcgagagtgcaacgtcctcctggccccgagcgcgtcgtcgcgccccgggagcagaccctcgcccagcagttaccgccgtcccgactttccgttccagttgcagctcctgccgggcaacatgtcaagagccgccgccgctacagctgccgccgccacctggggaagagcagcagcagcagcggcggccgcgggcacacgggggcaataaaccgagccacccgggcgtccagcgtgccggggaaccctctctgcgctcactgcccggcgggacccacgccatgtgctgagccatgtccctggccgcgcccgcgggcagcgcatggggcagcgcctgagtggcggcagatcttgcctcgatgtccccggccggctcctaccgcagccgccgccgcccccgccgccggtgaggaggaagctcgcgctgctcttcgccatgctctgcgtctggctctatatgttcctgtactcgtgcgccggctcctgcgccgccgcgccggggctgctgctcctgggctctgggtcccgcgccgcacacgacccgccagccctggccacagctccggacgggacgccccccaggctgccgttccgggcgccgccagccaccccactggcttcaggcaaggagatggccgagggcgctgcgagcccggaggagcagagtcccgaggtgccggactccccaagccccatctccagctttttcagtgggtctgggagcaagcagctgccgcaggccatcatcatcggcgtgaagaagggcggcacgcgggcgctgctggagtttctgcgcgtgcaccccgacgtgcgcgccgtgggcgccgagccccatttcttcgatcgcagctacgacaagggcctcgcttggtaccgggacctgatgcccagaaccctggacgggcagatcaccatggagaagacgcccagttacttcgtcacgcgggaggcccctgcgcgcatctcggccatgtccaaggacaccaagctcatcgtggtggtgcgggacccggtgaccagggccatctcggactacacgcagacgctgtccaagcggcccgacatccccaccttcgagagcttgacgttcaaaaacaggacagcgggcctcatcgacacgtcgtggagcgccatccagatcggcatctacgccaagcacctggagcactggctgcgccacttccccatccgccagatgctcttcgtgagcggcgagcggctcatcagcgacccggccggggagctgggccgcgtgcaagacttcctgggcctcaagaggatcatcacggacaagcacttctacttcaacaagaccaagggcttcccctgcctgaagaaggcggagggcagcagccggccccattgcctgggcaagaccaagggcaggacccatcctgagatcgaccgcgaggtggtgcgcaggctgcgcgagttctaccggcctttcaacctcaagttctaccagatgaccgggcacgactttggctgggattgagcagacccgggctatgtaccttacccacgtggcttatctattgacagagattatatgtatgtaaaatgtacagaaatctattttataataatttatttttaattcataagcaattaattcactaagctgcctagccacactctttagagagttagcttcataatctgttaacattccaaagtgtttaactctagtatttcgttctcttcttcacaattgatggtgcttctattttttcttctcccctacctgttatatttaaaacaaagaaaagcacaacttgagatttttgttgttacgggtattcagccttcagtcaccgtctgagttctccagttgctgcctccttgtcttgtcttgggtctcccattccagcttccctgtctcttcctgcctgtgtacctcgtaggaacgctgagctgcctcaacagggctgtattctgaagggcaggcctcatgcagcagcctccttgcagatgtggtgtcccgtccaatgatgtagcctgaaagccacagccctagggttctgtccctccctccattcagcacatggggaaatttctcactccctttacagggacatccacatcctttttttttcttttttttttttttttttttttgagatggagtcttgctcttgttgcccaggctggggcgtaatggtgtgatatatgcttaccacaacctctggctcccggttcaagcgattctcctgtctcagcctcccaagtatctgggattacaggcatgcaccaccatgcctggctaattttgtatttttagtagagacggggtttcttcatgttggtcaggctggtatcaaactcccgacctcaggtgatccgcctgccttggcctccaaagtgttgggattataggcgtgagccactgcgcccgctatccacatccttctagagtcagaatggtagggtctgttgacttcagcttttgattttgcaggatggccctgtgtcctcctctgccccattccctggttcattaaccagtttgaagtgtatgtagattgttgccccgtctttcccaggtcacatgtgtgagatgcctgggtgctgcttcagaaatcaagatgatctcctttaatttgcatgaaactacaccatgctgcgttccccaggcagacagttctgctttgacacaccaaagaatcccgtaggctagcagagccaccagcacaaaccaagggcgctgggtgtcgagactcagaggggtcagctgtgtccctcggcatcagcgtctaccaaggtgctgctaggtacagagccagccagtgttgggcagcaggctcacagcctcaatagggagaaaagacaaaggcctcaaaatgacaggcagcctgacagaggaaggagtctgacacctcagcttgatgcgtctttggaattcctagctcatctcagaattatatcttagagtgataatatgggtggtagccagtggccaaacagcaagaactaagagtggcccttgcaaaaaaaggttgggaaagctgggcccatattgcctgtaaacccttgagcctgatgctcatacagctgtcccttgttttagccaggtcttgacagaagggttaccagcactgtcactgctctacagaatgctctccccgtgcctctctgttgatttataacagttgggtaaccagatagcaatatagtggcaattgagtagccatatagtaatacaggggcagttggttaaacatatagcaatatcacataatgatatgtttaatttaacctcagttttttaaaccagaatgcttctaccataaaagaattgtgatttcagttatacttccatcaaggaatatgtgggaagatatacatattgtcaaaatggttgggatgggatagttacaaaggacacttttgtatgttgtatgggatcacttgcctgatagtataaggaacattgtatgaaaagatgaaaagatacttcatttttagaaactgatcagagatgtcactggtctttaagtgatgtcttgaaaatccagtatgtatttgcccaaaagttttagcctacatctagctagcttacacttagcagccaaaccatcattgtgtaggttctgttttggaggaagctcatgggggatctgtgtatttcttaggtttctccctgttctccaatgttttatccatttcgtagcttttttactgtctccagaaagtagtgtgggacctgcacttaggggaataccagaatcatagcgtggttctgccttcttgatgagtgattgtgaaaaacacctgcataagggtgctaattggttgtgtattttttcatttatttgaaatcaaactgagaacacctcttttcggtttacagcataacatggcttgaagtaaaaggcagtatccaagtccttcacctggtcttgccctgtctactttctgatcattctgatggtctgatgtggctgttgatgtggaactgcagaagagttcagagaagagtatgcaacaaagccataggaaaacacacaggagcttttccctccccttcaggtccccgccctctttccaagctggacaattttttattaagttgtttattccctgccttaaaactgaaacaggaaattttctggtagaaggagggtcatttagtcacgaacactgaagtgggtcaaaattctattctgggtcaaatccttgaattcaaacagatgtccataatcagtactgatggaatagagcaagtttttctatgtaagacaaataaatcaaacatcatgtgcatctcctcataagggtctgcaagggtctgatggtttaaagttcctaacagatctggttgcagcatctgccggagcttgcaccccatcatcggacggtcatcttcctgctgcagaagttaggtaacataagacttagatttcttcctgttctagcaatctgcaagaccaccaggcttaactttttagctgccagaagacaaacccccttttctgtttcggcaatttgtcctggcacgtgttttggacttcctccgatttacacgaaaagctctgatattcattggagtactttattttttttcctcagttttgtttcttttctcatgtaaaaacaaacaaaaaggtcaacaaaaaaaaattgaggtttttcttgtttctatctagttcatgctttctttgcggtgtttgaacagtagtctgttaacttagtaggtggtacctggaaaggtattttaagtatagtgactgtttaataaatacttaattggatgatggaggaggagaaattgttttcttcccaggattctctttgggggtcattttgtgtgacagatatattttagacatttggagaaacagtttcagatcctgccaggatatttttgtaaaaaaggaaaatggaagattccaataaactagaaacagtacgtatctaagatgctgacacagaagctaatgtgacttttcagcttatcaagaggatggccaataaaacttaaaggtgtggttagatgttttctcacttttgtgacattaatttatcactgagtctcattcaaccaagtaatctaaaatactgtgcaaattctagcagtatgtcttcgataacttggatgttaggatagccaatatgtacaaaaaattaaatcaagtattttgtcctatgtataacacaaattaattttacacagagaaagatgtttctaggcaagtgaaattctggtaattcatactatttctttgtatgaacaaataaaatatattttgccaaaaaaaaaaaaaaaaaa

SEQ ID NO: 64 - DNA, 1730 bp, homo sapiens
gcataaagctccagtccttcctccagggatgaggcagtaaggacttggactcctctgtccagcttttaacaatctaagttacgccctcttctgggtcacgctagaatcagatctgctctccagcatcttctgtttcctggcaagtgtttcctgctactttggattggccacgatgggctggagctgccttgtgacaggagcaggagggcttctgggtcagaggatcgtccgcctgttggtggaagagaaggaactgaaggagatcagggccttggacaaggccttcagaccagaattgagagaggaattttctaagctccagaacaggaccaagctgactgtacttgaaggagacattctggatgagccattcctgaaaagagcctgccaggacgtctcggtcgtcatccacaccgcctgtatcattgatgtctttggtgtcactcacagagagtccatcatgaatgtcaatgtgaaaggtacccagctactgttggaggcctgtgtccaagccagtgtgccagtcttcatctacaccagtagcatagaggtagccgggcccaactcctacaaggaaatcatccagaacggccacgaagaagagcctctggaaaacacatggcccactccatacccgtacagcaaaaagcttgctgagaaggctgtgctggcggctaatgggtggaatctaaaaaatggtgataccttgtacacttgtgcgttaagacccacatatatctatggggaaggaggcccattcctttctgccagtataaatgaggccctgaacaacaatgggatcctgtcaagtgttggaaagttctctacagtcaacccagtctatgttggcaacgtggcctgggcccacattctggccttgagggctctgcgggaccccaagaaggccccaagtgtccgaggtcaattctattacatctcagatgacacgcctcaccaaagctatgataaccttaattacatcctgagcaaagagtttggcctccgccttgattccagatggagccttcctttaaccctgatgtactggattggcttcctgctggaagtagtgagcttcctactcagcccaatttactcctatcaaccccccttcaaccgccacacagtcacattatcaaatagtgtgttcaccttctcttacaagaaggctcagcgagatctggcgtataagccactctacagctgggaggaagccaagcagaaaaccgtggagtgggttggttcccttgtggaccggcacaaggagaccctgaagtccaagactcagtgatttaaggatgacagagatgtgcatgtgggtattgttaggaaatgtcatcaaactccacccacctggcttcatacagaaggcaacaggggcacaagcccaggtcctgctgcctctctttcacacaatgcccaacttactgtcttcttcatgtcatcaaaatctgcacagtcactggcccaaccagaactttctgtcctaatcatacaccagaagacaaacaatatgatttgctgttaccaaatctcagtggctgattctgaacaattgtggtctctcttaacttgaggttctcttttgactaatagagctccatttcccctcttaaatgagaaagcatttcttttctctttaatctcctattccttcacacagttcaacataaagagcaataaatgttttaatgcttaacatggagagaaaaaaaaaaaaaaaaaaaaaa

SEQ ID NO: 65 - DNA, 8333 bp, homo sapiens
aatgttctgaccggtttggtgtttgtcatttcactttattaagtaaagaggaaatcgggaaaggaggaatagagagggtccccgagttcattcaagagcagaccgagagatgctccgatcccgagtcgggccggtggcggggtcaggccggcgcccgaggggggcgaacgcggacgccaggtcgcgcggtttaaatctcccgcctcccgcagcgggagcctgacacctccacgcactggtgcggaggggcactggctgccggagggccgggagtcggcgcggggctcgcgggcggtggccggaacgggtgccgggacggatcaccgtacggccgaacgcgacccgaggaggcggaagagcggcgccggcgacgtactgtaagacgatattactttaatcatcttcacatcagtatttatggaatagccacaggtgcctcatcctttagtaggagttaattatacatttactggccgagtaaacatctccgaatgtcactccatggattcctttgggcaacccagaccagaagataatcagtcagtagtcagaagaatgcaaaagaaatactggaaaactaaacaggtctttatcaaagcaacaggaaaaaaagaggatgagcacttggtggcgtctgatgctgaactggatgctaaacttgaggtttttcactctgttcaagagacatgcactgaacttctgaagataatcgagaaataccagctaagactcaatgttatatcagaggaagaaaatgagctagggctctttttaaaatttcaagcagaacgggatgcaactcaagctggcaaaatgatggatgccactggcaaggcactttgttcttcagccaagcaaagattggccctgtgtactcctctgtctcgtctgaagcaagaagtagcaacattcagtcaaagggcagtatctgataccttgatgacaattaatcggatggagcaggcacgcacagaatacagaggagctctactgtggatgaaagatgtatcccaagagctggacccagacaccttaaagcaaatggaaaagtttagaaaagtacagatgcaagtgagaaatagcaaagcttcttttgacaagttaaagatggatgtttgtcagaaagtggatttacttggagctagtcgctgcaatatgctatctcattcgctcactacctaccagagaacactgcttggattctggaagaaaacagctcgaatgatgtcccaaattcatgaagcctgtattggctttcatccgtatgattttgtagctctcaagcaactacaagacacgccaagcaagattagtgaagacaataaagatgaacaaataggcggttttcttactgaacagctcaataagctagttttgtctgatgaggaagcaagctttgagagtgaacaagcaaacaaagatcacaatgaaaaacattctcaaatgagagaatttggagcacctcagttttctaactctgaaaatgttgcaaaagatctacctgtagattcattggaaggagaagattttgagaaggaattctcatttctgaacaacctcctaagttctggttcttcaagtactagtgaatttacccaagaatgccagactgcctttgggagccccagtgccagtctcacatcccaggagccttccatggggtctgagcccctcgctcattcttctcgattccttccttcacaactctttgaccttggctttcatgtggctggagcgttcaacaactgggtctcccaagaggaatcagaactttgtctttcacacactgataaccagccagtgccttcacagagtccaaagaaattaacaagatcccccaacaatggcaaccaagacatgtcagcctggttcaatctgtttgcagacttggatccactttcaaacccagatgctattggacactcagatgatgaacttcttaatgcttgactgaagttataatgtcacttcagtggccttgagacatcaattttgcaacgtatttccttcgtggaaaggatttagattgtaacccgcacacaaaagcacggtgtttgtgaatataacacctgtcagccaactttagacagatggtaaagaccacatttgaataagtacacatctttcatatcttggatttgcagctgttggtactatgtggaaaatattagaaacttctatgtggaaaatattagaaactacagagtttgcgatatttagatactgaaatttatgtcaaaataacggctaggaataattctgtcaatatggagttgagcttatttctttggaaacccttttaagttgccttgctggctgtgagaattttatatgtggataacaaagatagatagatagcatgtaaattgggttgtggtttggggtcagtttttaaatgaaatagtagcgaggaggattttctgttttggaaaacaccattagaaccagaccagctttgttttgggttagagagagtaagatttgagaactcagtttgctttaatgaaatcacagagaaacttggtacttgtttttcttcatttggaggctaaaatgtaatgttttttcattcatacaaaataatggacactccctaattccattattaaatcttgaaggggaagtagcaggataattaatttgctaagcccatcctctgcagaaacagaaaaatctatcttcccatctcctaaaactcagaatgcacagtaatacttaaggcttgtacaagtgtcttcagacccactttttcatacacttgctatatagtagtatgcagtatttatattattcctgaaaataaaatgaggggagaatattccctaagcaactggcaatagtattcctgaaatacctagaaatttctatctgaatgagggagacacttatgaacaccttatccttacatatatttgcatacttatctcatattttgtgacataattatttaacccagaatactttctggcagacatacagaaagctctgtgtgatcaataagggagtgtctcatttttctacttccctctttctgtgggtgacatgatctgaggttctatttgattactaagcaaaatctgttacccctacagggtttagaacctaagtattagagaggaaggctatttaatggaagttagtgtaagctgataaaaacgtagctaccgtacacacacatcaatcactcaatttcctgtccttttaaattgcccaccctttaattttgaagcaatttcccaagtgtgtgtttgttttatatttgtcatccagtccattgcatttccataagaagacattttgactggctgggtgcggtggctcacgcttgtaatcccagcactttgggaggctgaggcaggcggatcacgaggtcaggagatggagaccatcctggctaacatggtgaaaccccgtctctactaaaaatacaaaaaattagccaggcgtggtggcacgtgcctgtagtcccagctactccggaggctgaggcaggagaatggcgtgaacccgggaggcggagcttgcagtgagctgagatggcgccactgcactccagcctaggcaacagagcaagactccgtctcaaaaaaaaaaaaaaaaaaaaaagacattttaactaagttattcacagtagcttccatgtgctcttagttctattctaaacaggcttatttagaaaaggattgcttgtaatgtttgtcatggtacatagaaaacattggaccagagtaggtaaaatgcagtccatgtcccatccatagccatctacaatagtaactgcccacaggctctccagaaaactactacaatggccaagtacagtataggctggaaagaccttatctgaaggtcagaaacattgactcagaaaaaaggtatgaagtctttccataaaatcttttcacaatattactcctatttcttttagattttaatgagccattacttatctcttcagaagacttaagtcttcctttatactcagtgaaatttcccagaatgtaatactgtcactgttctgccaagttccaatcaccaagatcatgattacgaatcccaatctgaattctatacccatggtgactctgatgctctcaacttttgagtgcctcaaaaaatgctaaaactttggctgggcatggtggctcacgcctgtaatcccagcactttgggaggccatggcgggtggaacatttgagggcatgagttcgagaccagcctggccaacatggtgaaaccctgtctctactaaaaatacaaaaattagccaggtgtggaggtacatgcctgtaatcccagctactcaggaggctgaggcagaagaattgcttgaacccaggcggcagaggttgcagtgagtcgagattgcaccactacactccagcctgggcaacagagagcgactctctcaaaaaaaaaaaaaaaaaaaaaaaaaaaagctaactttatgtcttgagagtttgtaccatttttctttgtagtggtcaccttgctaatgcattagttctgagatatttatctccctcacatgtgtgcaaggaagtccctgttatcgaatacagatactttaacaagcagacaaagcagaaacccaaagtccatactaggaacaccctaaattttccaaaagcaaaagttctcccgaaatggagacatacaagggacttttattattctgttactagtttctataacatttcttctttcaacagagtatatgtttcccatttaacccagagcaacattaacttccttagcaagtccagttctaacttccaacaagtccaaccactgtttttgaagagcatatcagtaactatattaagatgaaggtaaccacattcgtattttctcaagattagttatttgaagctcagcagtttttgtggtcagaaagaaattttgctctattaaaccaatactgctaatataaaaaaccaccacactgaagaaacgagggaaaggacgggataagcacagaacagagaatgactggttgctttttgtctcaatctagataatccattcaataagaagtaaattaattatccttaaccaatggtaggctgagaacaaccctcaaaatagatattttttatgttaaatggggagaaatatctatactttatgttatactggataaaaatgtgttttaagtctaaaaaaaaccagacgagctaaactttgcctagtgtgtctacaaccattttttaggagacgcaggaataccagggcataataagatcagattggtgtaattttgtatgtttttgaaatccttcattaattgtagaaccttgatatgattagaaacaaactgtatttcaacaaacaggtttcagtatttgcacactgaaaaagtgttttgtattttaactataaatatttcacgtatctgtatagaccatctagaaatgtagaggtcttacagcattagaacgaaggaagtttacatgtgctctatctatttttctgagcctcttttaataaagattgcaagaaggcataaaacaagagtttgtttcctgaagtttttagtacaattattgttttcctattcaaaaacttgggttttacctcaagatcatagtattaggaaagtacattgagttgatacggacatgggagaacgaaaataaaaccagggcaattaatatccttgtaaggccaggcgcggtagctcacgcctatataacagcactttgggaggccaaggcaggcagatcacttgaagttgggagtttgagaccaccctggccaacatggtgaaaccccatctctatgaaaaatataaaaattagctgggcatggtggcagatgcctgtaatcccagctacttgggaggctgaggcaggagaatcgcttgaacccgggaggtggaggttgcagtgagctgagatcaggccatgcactccagcctgggtgacagagtgagactccgtctcaaaagaaaatccttgtgagatgaattcgttcttatttcatatacaaggggactatgtaagatatgggaaataatataatgtacgttatttatgtaaatactttcagtaacaaaaactaacaaatatcaaaaatctgagcctagacacaaacaattaaatataagccatagtatgtaacctgacttattgaaggcaggaataaaaagaagagagccagaattgattcagttatttttgtcttccatagtgttggcagggccctgcatttctctaccttgagcaatgaagcagtcccagaattttggaatatagaaattaggaaggaaaaacgaactttaaaatattaatttagtagaactgaaagtaatgcatttcatgcaacagtaaagtgcttaaacatggcaaagaaaactaagggacaagataagaaaaatggttggtaaagatgggtcacatccagaagcccaacataagctatttttccatctttttctgtaccatttaaaagactactaaagagttcaaaacaaactgtccttggcatttaaagtcaaaacatggttcttcactcagtggtgtaaattaactactcattggccaaagagtaaatacaaaaaggagatgaagttctgactggtgttgtgggtgagattttgcagtgtatgtttttacatttgtagtgtacgttttaaacttccggttttcttgctgcctcaacatctccacaaacaggctgtgagcacctggcccagtgtgatatgggtggcccctgccacaagtttcccttgctaccttgcccatgacctagtaacatttaaatgcaccagtgaaattctctttttcttgtgtgcttctccctgacccaaaggctcctgcccatgtcttaggcctctccgctccccacctgcttggctgagccccctcccatgtgaccccctctcagcatgcagtgactggtctctctaggacctgtgagtatattacaactttttttcctgtgtctctcctgtgatatctcttgtggctaaacctcactgaccataacctaaaaaaacacatacaaaaaacatgaaagaaaaagttgtttcttgagctggcctggacgaacggggagccaggggctcgaccctggctgttggaggcgcagtgaggcctggtctccggctgccagaccacgctgagcggagcgcgcggcaggctcgcctcagcgctgcggggaacgcgcgcgccgccgtccgcggtcgcccgtaggtgcctgcacgcgtcggggtcacggcctttggccgacaggagcgagaagactcaggagccgccccgcgccttcgatccggcgctgctggagttcctggtgtgcccgctctccaagaagccgctcagatatgaagcatcaacaaatgaattgattaatgaagagttgagaatagcttatccaatcattgatgggattcctaatattatcatattaggcagctaggatgacacatcaaagaagcaagaagtggagcagcgctagttcataatttaaaaaaataaaacagccaactcttcttagtaccatataccttttaaaacacagtggcaagtaataagcggaagagaagaatctttctgtctctttctacgttgactgttcttattccactggtttatttagcaggactgttccactcagcctctgtagaagaaaacttcccacagggctgcacttgcacagctagcctttgcttttacagcctgctcttgcctattaccataccggtgtatgtattcttccacctttggacctggatggttattaaactcttcatgcataactgatgcaactagagtcaatatgctgtatatattaatgatagctcttgggcatctatctctgaaagctcaaatggatggaatttagtttgtgggaaagaggctttgctttgagcatatcaggcttaggactgtggacggcttaagttgcagacgcttcttttattgtactcttgttctgcccgtgttttttgaaggctctgacataactgctttatcagaagaaacattttgacagtgtcttgttggagataaacatccctaattgacatgtgatgactacttcttattccattcatctaagagtcattgaaattttgttttctttgtttgtttagcttcaaggtctttggtagtcacatgttagggatgactgaaataattccaaaggagtgatgttggaatagtccctctaagggaaagaaatgcatttgaacgaatgtgatataaaaccacataatcaaatagaaatttcatgtacttacaaaaatttagtttgtaaaattaccttcatttctttgacattaaatgcttatattagcaataaagatgttgacactttctcataaaaaattt

SEQ ID NO: 66 - DNA, 2294 bp, homo sapiens
agtccagatgatagttaagaaagcagtaagaatacagagagtccacaatgagatgaaaatgcactgccagttgaaacatcctcctacactggagctttataaatattttaaagacaaggattggattagatttgacattagaaatgtaccataatacagaaggcaatggacacctaaagaacagaatgaaaaccttcttaggaaatgaagcttgacacttcacccaccaggccaccacaagaatgttgcattttcattattatgatacttcaaacaaaataatggagccccacagaccgaatgtgaagacagcagtgccattgtctttggaaagctatcacatatctgaagagtatggctttcttcttccagattctctgaaagaacttccagatcattataggccttggatggaaattgccaacaaacttcctcaattgattgatgctcaccagcttcaagctcatgtggacaagatgcccctgctgagctgccagttcctgaagggtcaccgggagcagcgcctggcccacctggtcctgagcttcctcaccatgggttatgtctggcaggaaggagaggcgcagcctgcagaggtcctgccaaggaatcttgcccttccatttgtcgaagtctccaggaacttggggctccctcctatcctggtccactcagacttggtgctgacgaactggaccaaaaaagatccagacggattcctggaaattgggaacctggagaccatcatctcatttcctgggggagagagcctgcatggttttatactggtgactgctttggtagagaaagaagcagtgcctgggataaaggctcttgttcaggccacgaatgctatcttgcagcccaaccaggaggccctgctccaagccctgcagcgactgagactgtctattcaggacatcaccaaaaccttaggacagatgcatgattatgtagatccagacatattttatgcaggcatccggatctttctctctggatggaaagacaacccagcaatgcctgcagggctgatgtatgaaggagtttcccaagagcccctgaaatactccggcgggagtgcagctcagagcacagtgcttcatgcctttgatgagttcttaggcattcgtcatagcaaggaaagtggtgactttctgtacagaatgagggattacatgcctccttcccataaggccttcatagaagacatccactcagcaccttccctgagggactacatcctgtcatctggacaggaccacttgctgacagcttataaccagtgtgtgcaggccctggcagagctgcggagctatcacatcaccatggtcaccaaatacctcatcacagctgcagccaaggcaaagcatgggaagccaaaccatctcccagggcctcctcaggctttaaaagacaggggcacaggtggaaccgcagttatgagctttcttaagagtgtcagggataagaccttggagtcaatccttcacccacgtggttaggaggctgccctctccccagcaatgcagagcccccatggagggcaggtgggcctggagaatgagggtcagggttctgcctgggatcatccaggaaggatctcagccctattcatgtttctgctctacagagcactatattctccttgttgagagctgttggcttcacaaaggagagttgatgtggccaagcctttccctccctacctgatcactgcttaacggcatgtataatggatacttcctcatgcagaacccccagaggagtgactgtatgccattctctttgccaagtaatagaaaaccaatctaaatgtcaaaaatcagataaaattgcctggggatacattacttgttgattttcttaaaaaacaaattcacttaacaattcattaagttcatactgagcactgcctccaagattaaaaccaggatttctgtggtcccagaccagccctcttctccctgaatgtgttgagttggtggcaggaggttggaaatgctccagtggagatgggaagatagaggatgctgacaataaggacttggaagtcactagtgtgaaaatgagcagttaatgatatgggaacggatgagactttccacgtggtacctagatttgcaaattctattgtaatgcctttatttttagaagaattattctctcttcttactctgaaaatctgtatttgtaaaatgaatgaatggatcctatataagtaaataagaaaactgggaataagtagtaaatcaatgtgtttagtgtgcaaataaatgtaaatgcttttattg

SEQ ID NO: 67 - DNA, 1629 bp, homo sapiens
acacatcaggggcttgctcttgcaaaaccaaaccacaagacagacttgcaaaagaaggcatgcacagctcagcactgctctgttgcctggtcctcctgactggggtgagggccagcccaggccagggcacccagtctgagaacagctgcacccacttcccaggcaacctgcctaacatgcttcgagatctccgagatgccttcagcagagtgaagactttctttcaaatgaaggatcagctggacaacttgttgttaaaggagtccttgctggaggactttaagggttacctgggttgccaagccttgtctgagatgatccagttttacctggaggaggtgatgccccaagctgagaaccaagacccagacatcaaggcgcatgtgaactccctgggggagaacctgaagaccctcaggctgaggctacggcgctgtcatcgatttcttccctgtgaaaacaagagcaaggccgtggagcaggtgaagaatgcctttaataagctccaagagaaaggcatctacaaagccatgagtgagtttgacatcttcatcaactacatagaagcctacatgacaatgaagatacgaaactgagacatcagggtggcgactctatagactctaggacataaattagaggtctccaaaatcggatctggggctctgggatagctgacccagccccttgagaaaccttattgtacctctcttatagaatatttattacctctgatacctcaacccccatttctatttatttactgagcttctctgtgaacgatttagaaagaagcccaatattataatttttttcaatatttattattttcacctgtttttaagctgtttccatagggtgacacactatggtatttgagtgttttaagataaattataagttacataagggaggaaaaaaaatgttctttggggagccaacagaagcttccattccaagcctgaccacgctttctagctgttgagctgttttccctgacctccctctaatttatcttgtctctgggcttggggcttcctaactgctacaaatactcttaggaagagaaaccagggagcccctttgatgattaattcaccttccagtgtctcggagggattcccctaacctcattccccaaccacttcattcttgaaagctgtggccagcttgttatttataacaacctaaatttggttctaggccgggcgcggtggctcacgcctgtaatcccagcactttgggaggctgaggcgggtggatcacttgaggtcaggagttcctaaccagcctggtcaacatggtgaaaccccgtctctactaaaaatacaaaaattagccgggcatggtggcgcgcacctgtaatcccagctacttgggaggctgaggcaagagaattgcttgaacccaggagatggaagttgcagtgagctgatatcatgcccctgtactccagcctgggtgacagagcaagactctgtctcaaaaaataaaaataaaaataaatttggttctaatagaactcagttttaactagaatttattcaattcctctgggaatgttacattgtttgtctgtcttcatagcagattttaattttgaataaataaatgtatcttattcacatc

SEQ ID NO: 68 - DNA, 1859 bp, homo sapiens
gcaggcacaaactcatccatccccagttgattggaagaaacaacgatgactcctgggaagacctcattggtgtcactgctactgctgctgagcctggaggccatagtgaaggcaggaatcacaatcccacgaaatccaggatgcccaaattctgaggacaagaacttcccccggactgtgatggtcaacctgaacatccataaccggaataccaataccaatcccaaaaggtcctcagattactacaaccgatccacctcaccttggaatctccaccgcaatgaggaccctgagagatatccctctgtgatctgggaggcaaagtgccgccacttgggctgcatcaacgctgatgggaacgtggactaccacatgaactctgtccccatccagcaagagatcctggtcctgcgcagggagcctccacactgccccaactccttccggctggagaagatactggtgtccgtgggctgcacctgtgtcaccccgattgtccaccatgtggcctaagagctctggggagcccacactccccaaagcagttagactatggagagccgacccagcccctcaggaaccctcatccttcaaagacagcctcatttcggactaaactcattagagttcttaaggcagtttgtccaattaaagcttcagaggtaacacttggccaagatatgagatctgaattacctttccctctttccaagaaggaaggtttgactgagtaccaatttgcttcttgtttacttttttaagggctttaagttatttatgtatttaatatgccctgagataactttggggtataagattccattttaatgaattacctactttattttgtttgtctttttaaagaagataagattctgggcttgggaattttattatttaaaaggtaaaacctgtatttatttgagctatttaaggatctatttatgtttaagtatttagaaaaaggtgaaaaagcactattatcagttctgcctaggtaaatgtaagatagaattaaatggcagtgcaaaatttctgagtctttacaacatacggatatagtatttcctcctctttgtttttaaaagttataacatggctgaaaagaaagattaaacctactttcatatgtattaatttaaattttgcaatttgttgaggttttacaagagatacagcaagtctaactctctgttccattaaacccttataataaaatccttctgtaataataaagtttcaaaagaaaatgtttatttgttctcattaaatgtattttagcaaactcagctcttccctattgggaagagttatgcaaattctcctataagcaaaacaaagcatgtctttgagtaacaatgacctggaaatacccaaaattccaagttctcgatttcacatgccttcaagactgaacaccgactaaggttttcatactattagccaatgctgtagacagaagcattttgataggaatagagcaaataagataatggccctgaggaatggcatgtcattattaaagatcatatggggaaaatgaaaccctccccaaaatacaagaagttctgggaggagacattgtcttcagactacaatgtccagtttctcccctagactcaggcttcctttggagattaaggcccctcagagatcaacagaccaacatttttctcttcctcaagcaacactcctagggcctggcttctgtctgatcaaggcaccacacaacccagaaaggagctgatggggcagaacgaactttaagtatgagaaaagttcagcccaagtaaaataaaaactcaatcacattcaattccagagtagtttcaagtttcacatcgtaaccattttcgccc

SEQ ID NO: 69 - DNA, 1151 bp, homo sapiens
attctctccccagcttgctgagccctttgctcccctggcgactgcctggacagtcagcaaggaattgtctcccagtgcattttgccctcctggctgccaactctggctgctaaagcggctgccacctgctgcagtctacacagcttcgggaagaggaaaggaacctcagaccttccagatcgcttcctctcgcaacaaactatttgtcgcaggaataaagatggctgctgaaccagtagaagacaattgcatcaactttgtggcaatgaaatttattgacaatacgctttactttatagaaaacctggaatcagattactttggcaagcttgaatctaaattatcagtcataagaaatttgaatgaccaagttctcttcattgaccaaggaaatcggcctctatttgaagatatgactgattctgactgtagagataatgcaccccggaccatatttattataagtatgtataaagatagccagcctagaggtatggctgtaactatctctgtgaagtgtgagaaaatttcaactctctcctgtgagaacaaaattatttcctttaaggaaatgaatcctcctgataacatcaaggatacaaaaagtgacatcatattctttcagagaagtgtcccaggacatgataataagatgcaatttgaatcttcatcatacgaaggatactttctagcttgtgaaaaagagagagacctttttaaactcattttgaaaaaagaggatgaattgggggatagatctataatgttcactgttcaaaacgaagactagctattaaaatttcatgccgggcgcagtggctcacgcctgtaatcccagccctttgggaggctgaggcgggcagatcaccagaggtcaggtgttcaagaccagcctgaccaacatggtgaaacctcatctctactaaaaatacaaaaaattagctgagtgtagtgacgcatgccctcaatcccagctactcaagaggctgaggcaggagaatcacttgcactccggaggtagaggttgtggtgagccgagattgcaccattgcgctctagcctgggcaacaacagcaaaactccatctcaaaaaataaaataaataaataaacaaataaaaaattcataatgtgaaaaaaaaaaaaaaaaaa

SEQ ID NO: 70 - DNA, 1498 bp, homo sapiens
accaaacctcttcgaggcacaaggcacaacaggctgctctgggattctcttcagccaatcttcattgctcaagtgtctgaagcagccatggcagaagtacctgagctcgccagtgaaatgatggcttattacagtggcaatgaggatgacttgttctttgaagctgatggccctaaacagatgaagtgctccttccaggacctggacctctgccctctggatggcggcatccagctacgaatctccgaccaccactacagcaagggcttcaggcaggccgcgtcagttgttgtggccatggacaagctgaggaagatgctggttccctgcccacagaccttccaggagaatgacctgagcaccttctttcccttcatctttgaagaagaacctatcttcttcgacacatgggataacgaggcttatgtgcacgatgcacctgtacgatcactgaactgcacgctccgggactcacagcaaaaaagcttggtgatgtctggtccatatgaactgaaagctctccacctccagggacaggatatggagcaacaagtggtgttctccatgtcctttgtacaaggagaagaaagtaatgacaaaatacctgtggccttgggcctcaaggaaaagaatctgtacctgtcctgcgtgttgaaagatgataagcccactctacagctggagagtgtagatcccaaaaattacccaaagaagaagatggaaaagcgatttgtcttcaacaagatagaaatcaataacaagctggaatttgagtctgcccagttccccaactggtacatcagcacctctcaagcagaaaacatgcccgtcttcctgggagggaccaaaggcggccaggatataactgacttcaccatgcaatttgtgtcttcctaaagagagctgtacccagagagtcctgtgctgaatgtggactcaatccctagggctggcagaaagggaacagaaaggtttttgagtacggctatagcctggactttcctgttgtctacaccaatgcccaactgcctgccttagggtagtgctaagaggatctcctgtccatcagccaggacagtcagctctctcctttcagggccaatccccagcccttttgttgagccaggcctctctcacctctcctactcacttaaagcccgcctgacagaaaccacggccacatttggttctaagaaaccctctgtcattcgctcccacattctgatgagcaaccgcttccctatttatttatttatttgtttgtttgttttattcattggtctaatttattcaaagggggcaagaagtagcagtgtctgtaaaagagcctagtttttaatagctatggaatcaattcaatttggactggtgtgctctctttaaatcaagtcctttaattaagactgaaaatatataagctcagattatttaaatgggaatatttataaatgagcaaatatcatactgttcaatggttctgaaataaacttcactgaag

SEQ ID NO: 71 - DNA, 2197 bp, homo sapiens
aaattaacgtactatcctccttacttttgggtcgggccctccgggaagatggcggccgtgcaggcggccgaggtgaaagtggatggcagcgagccgaaactgagcaagaagtggtggtaatcattagttccagggtgctctgccatgttgacgcaagctgctgtaaggcttgttagggggtccctgcgcaaaacctcctgggcagagtggggtcacagggaactgcgactgggtcaacttgctcctttcacagcgcctcacaaggacaagtcattttctgatcaaagaagtgagctgaagagacgcctgaaagctgagaagaaagtagcagagaaggaggccaaacagaaagagctcagtgagaaacagctaagccaagccactgctgctgccaccaaccacaccactgataatggtgtgggtcctgaggaagagagcgtggacccaaatcaatactacaaaatccgcagtcaagcaattcatcagctgaaggtcaatggggaagacccatacccacacaagttccatgtagacatctcactcactgacttcatccaaaaatatagtcacctgcagcctggggatcacctgactgacatcaccttaaaggtggcaggtaggatccatgccaaaagagcttctgggggaaagctcatcttctatgatcttcgaggagagggggtgaagttgcaagtcatggccaattccagaaattataaatcagaagaagaatttattcatattaataacaaactgcgtcggggagacataattggagttcaggggaatcctggtaaaaccaagaagggtgagctgagcatcattccgtatgagatcacactgctgtctccctgtttgcatatgttacctcatcttcactttggcctcaaagacaaggaaacaaggtatcgccagagatacttggacttgatcctgaatgactttgtgaggcagaaatttatcatccgctctaagatcatcacatatataagaagtttcttagatgagctgggattcctagagattgaaactcccatgatgaacatcatcccagggggagccgtggccaagcctttcatcacttatcacaacgagctggacatgaacttatatatgagaattgctccagaactctatcataagatgcttgtggttggtggcatcgaccgggtttatgaaattggacgccagttccggaatgaggggattgatttgacgcacaatcctgagttcaccacctgtgagttctacatggcctatgcagactatcacgatctcatggaaatcacggagaagatggtttcagggatggtgaagcatattacaggcagttacaaggtcacctaccacccagatggcccagagggccaagcctacgatgttgacttcaccccacccttccggcgaatcaacatggtagaagagcttgagaaagccctggggatgaagctgccagaaacgaacctctttgaaactgaagaaactcgcaaaattcttgatgatatctgtgtggcaaaagctgttgaatgccctccacctcggaccacagccaggctccttgacaagcttgttggggagttcctggaagtgacttgcatcaatcctacattcatctgtgatcacccacagataatgagccctttggctaaatggcaccgctctaaagagggtctgactgagcgctttgagctgtttgtcatgaagaaagagatatgcaatgcgtatactgagctgaatgatcccatgcggcagcggcagctttttgaagaacaggccaaggccaaggctgcaggtgatgatgaggccatgttcatagatgaaaacttctgtactgccctggaatatgggctgccccccacagctggctggggcatgggcattgatcgagtcgccatgtttctcacggactccaacaacatcaaggaagtacttctgtttcctgccatgaaacccgaagacaagaaggagaatgtagcaaccactgatacactggaaagcacaacagttggcacttctgtctagaaaataataattgcaagttgtataactcaggcgtctttgcatttctgcgaaagatcaaggtctgcaagggaattcttgtgtgctgctttccatttgacaccgcagttctgttcagccatcagaagagagacaaggaattaaaaatttctttttaatcctgttaccaaataaaaaa

SEQ ID NO: 72 - DNA, 5228 bp, homo sapiens
cattgtcgcccacgctgcagtagcggcttctgcggctccaagccagcgggtcctgtgaaggcgagcagacgcggagaaaggacgcgggagtgagagagggtgagtcagccactgtctaaacgataacgggaggcggctctgcggggtagggttgaattcagtaaatgggctcgtgctgctgtctcttcggagacgctgctatcttagcgtcagcgagggaaggttgaggaggagccagagccgggtcctgcagcgtttctcgccatcagcgcccgtcgccatctccaccatgcagtcccgggaagacgccccgcgctctcgccgcctagccagtccccgtggtgggaagcggcccaagaagattcacaaacccacagtttcggcctttttcacgggtccagaggaattaaaggacacggcccattctgcagccctgctggcacagctcaagtccttctacgatgcgcggctgctgtgtgatgtgaccatcgaggtggtgacgcctggcagcgggcctggcacgggtcgcctgttcccctgcaaccgcaatgtgctggccgcggcatgtccctacttcaagagcatgttcacaggtggcatgtacgagagccagcaggccagcgtgaccatgcacgatgtggacgccgagtccttcgaggtgttggtcgactactgctacacgggtcgtgtgtctctcagtgaggccaacgtggagcgcctgtacgcggcctccgacatgctacagctggaatatgtgcgggaagcctgtgcctccttcttagcccgacgtcttgacctgaccaactgcaccgccatcctcaagtttgcagatgcctttggccatcgcaagctgcgatcccaggcccagtcctatatagctcagaacttcaagcaactcagccacatgggttcaattcgggaggagactctagcagatctgaccctggcccagctgctggctgtcctgcgcttggatagtctggacgtggagagtgagcagacagtgtgccatgtggcagtgcagtggctggaggctgctcccaaagagcggggtcccagtgctgcagaagtcttcaagtgcgtgcgctggatgcacttcactgaagaagatcaggactacttagaagggctgctgaccaagcccatcgtgaagaagtactgcctggacgttattgaaggggccctgcagatgcgctatggtgacctgttgtacaagtctctggtgccagtgccaaacagcagcagcagcagtagcagcagcaactctcttgtatctgcagcagaaaatccaccccagagactgggtatgtgtgccaaggagatggtgatcttctttggacaccccagagatccctttctctgctgtgatccatactcgggggacctttacaaagtgccgtcacctttgacctgtctggctcacactaggactgtcaccactctagctgtctgtatctctcctgaccatgacatctatctagctgctcagcccaggacagacctctgggtgtataaaccagctcagaatagttggcagcaacttgcagatcgcttgctgtgtcgtgagggcatggatgtggcatatctcaatggctatatctacattttgggggggcgagaccctattactggagttaagttgaaggaagtggaatgctacaatgttaagagaaaccagtgggcattggtggctccactgccccattcttttttatcctttgacctaatggtaattcgagactatctctatgctctcaacagtaagcgcatgttctgttatgatcctagccacaatatgtggctgaagtgcgtttctctgaagcgcaatgactttcaggaagcctgcgtcttcaatgaggagatctattgtatctgtgatatcccagtcatgaaggtctacaacccagttagggcagaatggaggcaaatgaataatattcccttggtctcagagaccaacaactacagaattatcaagcatggccaaaaattgttgctcatcacctctcgcaccccacagtggaaaaagaaccgggtgactgtgtatgaatatgatattaggggagaccaatggattaatataggtaccacattaggcctcttgcagtttgattctaactttttttgcctctctgctcgtgtttatccttcctgccttgaacctggtcagagtttcctcactgaagaagaagaaataccaagtgagtctagcactgaatgggacttaggtggattcagtgagccagactctgagtcaggaagttcaagttctctttctgatgatgatttttgggtgcgtgtagcgcctcagtgaaatgcacaggatcaacagggtttgttgtaactagattgaaacactaagttgtttttactgttttggaaaatatcttaaatatcctttttgttcctaaaggagaggaaaagttgattaacttctggtttggtttagaaaaagtaatgtttgaaatacgaaggtaatttaatgttacaaattttaacactcaaatcaaccttttaataattttctgtgctaagggtccagtatttatttgattatttagtatgtttatgtttcatgacactaatttagtcttttgatacattttacattctgtttactgccacaagcactgtggcaataacttttgaattttaatttttataatagaaaaatgattaggaattgctagatagtgttttgaaagcatatctttttcttcagaacaatgtagacttccaaaatggttaacctaaggggtctttacaaaatgtgttataagttaaacataatttgggaagttttacttttgttttcttctatgaagaaaaaaatgcaggctgggcgcggtggctcacgcctgtaatcctagcactttgggaggccgaggcaggtggatcacctgaggtcagttcaagaccagcctggccaacatggtgaaaccccgtctctactaaaaatacaaaaattagctgggcgtggtggcatgcgcctgtaatcccagctacccaggaggctgaggcaggagaattgctgaaacccgggagtcagaggctgcagagagccgagactgggccactgcactccagcctggatgacagagtgagactccgtctcaaaaaaaaaaaaaaaaaaaaaaggaaaaaaaaaaaagaaaaaaaaccatatgtgtattagggtgactgagtggtgacttcatttataataatacagagaatagctataagctcattgacagtaaaaacaacaaaccaggattctactgtttgaaaagaagtttcgttttaattttggaatttagaatgtgtatttgcaaagtcaccaattttcatctaaaaggttatattctagttgtgtcaccaaatcatcaaaaaaccttaaaaaagaagtaacttgctttgtaggtttgtattgttgatctaaacctgatacatgcttcatttaatcaggaataatccttttttttctgctggacatgtataaatttcactggattgtataaatttttatctattgccttaaacatttacatgattctcaatatgttttagctgtacagttttggtgttcatcttagaggattcttcagcagaagtgatatttctttactgttttgtgaggtaatactgattttgaaaatatatataagctaaaaacagtatttcgttgatatcagtagtcattgtgttaactataaagtcaagtgccagcaaagaactttaaaactgtaaagctgtgtatagaactgttttgtgtagcatggaaatattctgtcagctttttaaagtcactaaatgttcttgattatcagcttgaaggtatttttgtattacaagttgacagttgctgggtgtagtggctcatgcctgtaatcctagcaactcggggctgaggtgggaggattgcttcagcccaggagtttgagaccagcctgggcaacatagcaaaaccccatctctacaaaaataaaaaatatgtctgggcatggtggcccaagtctgagtcccagttacttgggaggatcacttgaatgtaggatcacttgagtctaggagttcggggctgcagctatcatctgcagctataatcatagctcactgcagctatgatcatgtctcagcactccagctttggcaacagaacgagatcccatctcttagaaaaacaaagttgatagttaaagaacataagtggatgatggcatttgaggccactagtgaaagtatgttttctctaaaatatttctctaatagtgatataaatggctattttattatgatgtttgtatgtgttttgtatttctctgtaaaccatgctccagtctttgtttttctgttaccataatgtaagagaaggtcctggaacagagactaaatcccacgaaactgacattgttaaacacactaaaacagaagtacttacctcttgaagatttaatatataatggttgacatgatacatgtacatgatgaatgaccagatgcttatggtctacattttcctttatcctgttagtattaccttccttaatctttgttcattaacatgctaattcctcttcagtgtttattttctagtgacagaatgctaacatttcttacaccctggcagaagggagagaaatgtgttttggggtgggtaactaaatttttgagtgaaatatcataagatgagaatggaaagagggagacacaaagagttataacaaaaaaacaatggtttttttagccatttgactggctctttaaatagtctacaagacattcacgtttaacatcacttttagtgaaataaaatgtgccatactagtatgtgcttcaaaagggcaaatgtgctttagtgccctaaggctaaattttggtcatttgacatcagagatgttgtaagtattgcacttaatacgcacctatttctcaatagtgttattttttggctagcattttctttaccactatcttgttgatagctttttgttctctaaggttgaaacatgacagtgcttatctcaaacagattacccatctgcagaactaaggaaagcaatttatgtatgaaagaaattcttgaattcgtcattctcaacctttgaattaaagcttagactaaatagtaatatatcgtgggaaggattttggttttgtgatatttctgtgaattaaggaatagatgttaaccattattttgtagaaaagtgatttgtatgtggttaattataaataaaactggtacc

SEQ ID NO: 73 - DNA, 2267 bp, homo sapiens
gtgctccctgccgaggagatgtgagggattttctcttgggggagaaatcagtggtcgagcgcctgcccagctcaaatgccacccggctcagagggaggcctgcggcccagggatcccggagggagagcaacgtcacacctcctgaggacagccaggactccagcttttgctgagctttgcatcttgcctccttccttcaaaaggctccaggcccatgctcggctgtcttcaagtcccgcatgcccctggccaggcacctcaccgcccctccagcccagcccaatcctagagctcacctccaggacccagagtctgcccttctgcccagaatgactcaccattatttctagctcgagtgagaagacgtgatgaggagttgggctgcctgttggtgcatctcagattcctgcagcatctgatcagctctgcaaggaagagagcttcacgtctctggtcagccaagcgaggctgtctctccagctctcagagagctctcggggctctcctgcaggagaccaggccaatgctcctgtgcttcctggggccagtagcagcaccctgagctccctgccaccaggcagctgaaaggcatagcgtgaggtgcttctctcagtcccaattatgacagtggccaccggagacccagcagacgaggctgctgccctccctgggcacccacaggacacctatgacccagaggcagaccacgagtgctgtgagagggtggtgatcaacatctcagggctgcggtttgagacccagctaaagaccttagcccagtttccagagaccctcttaggggacccaaagaaacgaatgaggtactttgaccccctccgaaatgagtactttttcgatcggaaccgccctagctttgatgccattttgtactactaccagtcagggggccgattgaggcgacctgtgaatgtgcccttagatatattctctgaagaaattcggttttatgagctgggagaagaagcgatggagatgtttcgggaagatgaaggctacatcaaggaggaagagcgtcctctgcctgaaaatgagtttcagagacaagtgtggcttctctttgaatacccagagagctcagggcctgccaggattatagctattgtgtctgtcatggtgattctgatctcaattgtcagcttctgtctggaaacattgcccatcttccgggatgagaatgaagacatgcatggtagtggggtgaccttccacacctattccaacagcaccatcgggtaccagcagtccacttccttcacagaccctttcttcattgtagagacactctgcatcatctggttctcctttgaattcttggtgaggttctttgcctgtcccagcaaagccggcttcttcaccaacatcatgaacatcattgacattgtggccatcatcccctacttcatcaccctggggacagagttggctgagaagccagaggacgctcagcaaggccagcaggccatgtcactggccatcctccgtgtcatccggttggtaagagtctttaggattttcaagttgtccagacactccaaaggtctccagattctaggtcagaccctcaaagccagcatgagagaattgggcctcctgatattctttctcttcataggggtcatccttttctctagtgctgtgtattttgcagaggccgatgagcgagagtcccagttccccagcatcccagatgccttctggtgggcagtcgtctccatgacaactgtaggctatggagacatggttccgactaccattgggggaaagatagtgggttccctatgtgcgattgcaggtgtgttaactattgccttaccggtccctgtcattgtgtccaatttcaactacttctaccaccgggagacagagggagaggaacaggcccaatacttgcaagtgacaagctgtccaaagatcccatcctcccctgacctaaagaaaagtagaagtgcctctaccattagtaagtctgattacatggagatccaggagggtgtaaataacagtaatgaggactttagagaggaaaacttgaaaacagccaactgtaccttggctaacacaaactatgtgaatattaccaaaatgttaactgatgtctgattgaaacctattaccgtactcacagctcaatggaactaatgcagatgttgcataatagcctgcattgtagtcagtgtgttctacagtgtgtatctggttctgcatggaaagcaatagttgtgcaagtgaaaaaaaaaaaaaaaaaa

SEQ ID NO: 74 - DNA, 6079 bp, homo sapiens
atcctcagtctcccagttcaagctaatcattgacagagctttacaatcacaagcttttactgaagctttgataagacagtccagcagttggtggcaaatgaagccaggctgtgcggcaggatctccagggaatgaatggattttcttcagcactgatgaaataaccacacgctataggaatacaatgtccaacgggggattgcaaagatctgtcatcctgtcagcacttattctgctacgagctgttactggattctctggagatggaagagctatatggtctaaaaatcctaattttactccggtaaatgaaagtcagctgtttctctatgacactttccctaaaaactttttctggggtattgggactggagcattgcaagtggaagggagttggaagaaggatggaaaaggaccttctatatgggatcatttcatccacacacaccttaaaaatgtcagcagcacgaatggttccagtgacagttatatttttctggaaaaagacttatcagccctggattttataggagtttctttttatcaattttcaatttcctggccaaggcttttccccgatggaatagtaacagttgccaacgcaaaaggtctgcagtactacagtactcttctggacgctctagtgcttagaaacattgaacctatagttactttataccactgggatttgcctttggcactacaagaaaaatatggggggtggaaaaatgataccataatagatatcttcaatgactatgccacatactgtttccagatgtttggggaccgtgtcaaatattggattacaattcacaacccatatctagtggcttggcatgggtatgggacaggtatgcatgcccctggagagaagggaaatttagcagctgtctacactgtgggacacaacttgatcaaggctcactcgaaagtttggcataactacaacacacatttccgcccacatcagaagggttggttatcgatcacgttgggatctcattggatcgagccaaaccggtcggaaaacacgatggatatattcaaatgtcaacaatccatggtttctgtgcttggatggtttgccaaccctatccatggggatggcgactatccagaggggatgagaaagaagttgttctccgttctacccattttctctgaagcagagaagcatgagatgagaggcacagctgatttctttgccttttcttttggacccaacaacttcaagcccctaaacaccatggctaaaatgggacaaaatgtttcacttaatttaagagaagcgctgaactggattaaactggaatacaacaaccctcgaatcttgattgctgagaatggctggttcacagacagtcgtgtgaaaacagaagacaccacggccatctacatgatgaagaatttcctcagccaggtgcttcaagcaataaggttagatgaaatacgagtgtttggttatactgcctggtctctcctggatggctttgaatggcaggatgcttacaccatccgccgaggattattttatgtggattttaacagtaaacagaaagagcggaaacctaagtcttcagcacactactacaaacagatcatacgagaaaatggtttttctttaaaagagtccacgccagatgtgcagggccagtttccctgtgacttctcctggggtgtcactgaatctgttcttaagcccgagtctgtggcttcgtccccacagttcagcgatcctcatctgtacgtgtggaacgccactggcaacagactgttgcaccgagtggaaggggtgaggctgaaaacacgacccgctcaatgcacagattttgtaaacatcaaaaaacaacttgagatgttggcaagaatgaaagtcacccactaccggtttgctctggattgggcctcggtccttcccactggcaacctgtccgcggtgaaccgacaggccctgaggtactacaggtgcgtggtcagtgaggggctgaagcttggcatctccgcgatggtcaccctgtattatccgacccacgcccacctaggcctccccgagcctctgttgcatgccgacgggtggctgaacccatcgacggccgaggccttccaggcctacgctgggctgtgcttccaggagctgggggacctggtgaagctctggatcaccatcaacgagcctaaccggctaagtgacatctacaaccgctctggcaacgacacctacggggcggcgcacaacctgctggtggcccacgccctggcctggcgcctctacgaccggcagttcaggccctcacagcgcggggccgtgtcgctgtcgctgcacgcggactgggcggaacccgccaacccctatgctgactcgcactggagggcggccgagcgcttcctgcagttcgagatcgcctggttcgccgagccgctcttcaagaccggggactaccccgcggccatgagggaatacattgcctccaagcaccgacgggggctttccagctcggccctgccgcgcctcaccgaggccgaaaggaggctgctcaagggcacggtcgacttctgcgcgctcaaccacttcaccactaggttcgtgatgcacgagcagctggccggcagccgctacgactcggacagggacatccagtttctgcaggacatcacccgcctgagctcccccacgcgcctggctgtgattccctggggggtgcgcaagctgctgcggtgggtccggaggaactacggcgacatggacatttacatcaccgccagtggcatcgacgaccaggctctggaggatgaccggctccggaagtactacctagggaagtaccttcaggaggtgctgaaagcatacctgattgataaagtcagaatcaaaggctattatgcattcaaactggctgaagagaaatctaaacccagatttggattcttcacatctgattttaaagctaaatcctcaatacaattttacaacaaagtgatcagcagcaggggcttcccttttgagaacagtagttctagatgcagtcagacccaagaaaatacagagtgcactgtctgcttattccttgtgcagaagaaaccactgatattcctgggttgttgcttcttctccaccctggttctactcttatcaattgccatttttcaaaggcagaagagaagaaagttttggaaagcaaaaaacttacaacacataccattaaagaaaggcaagagagttgttagctaaactgatctgtctgcatgatagacagtttaaaaattcatcccagttccatatgctggtaacttacaggagatatacctgtattatagaaagacaatctgagatacagctgtaaccaaggtgatgacaattgtctctgctgtgtggttcaaagaacattcccttaggtgttgacatcagtgaactcagttcttggatgtaaacataaaggcttcatcctgacagtaagctatgaggattacatgctacattgcttcttaaagtttcatcaactgtattccatcattctgctttagctttcatctctaccaatagctacttgtggtacaataaattatttttaagaagtaaaactctggggctggacgctgtggctcacacctgtaatctcagcactttgggaggccgaggcggggagatcacctgaggtgaggagttcgagaccagcctggccaacatggtgaaaccatgtctctactaaaaatacaaaaaattagccaggcgtggtgacagtggcacctgtaatcccagctacttgggaggctgaggcagaagtttgaacccaggaaacaggttacagtaggccaaaattgcgccactgcactccagcctaggcgacaacagcaagactgtgtccaaaaaaaaaaaaaaaagcaaaagcaaaactttgttttgttagactctacagcagagatttaacacccttctttaaactgggtagtcagtgatagataatatatattctgtcacttctaataaggtgccttctcctttaggtcagggtggttctaaaatggaaagaaaacacaatagggtaagtagtgcttgtctaagccagttacaacacagactcttaaagaggatcaagcccttcatttttctaacaacaaaaaatcacctatagaatatctaatttgtgatcttttactagatctgattttttaaaataatgtaatttccggccaggcacggtggcaccgcctgtaatcccagcactttgggaggccaaggcaggtggatcacctgaggttaggagttcgagactagcctggccaacatggcaaaaccccatctctactaaaaatacaaaagttagccgggcatggtggtgggcacctgtaatcccagctactcaggaggccgaggcaggagaatcgcttgaacccgagaggcagaggttgcaatgagccaagatcgtgccattgcactccagcctgggggacagggcaagactgtctctcaaaataaaaaaaaataataaaaataaaaataaaagtaatttccaaaacctcatctcatggaaagatcacaggatgaaggaaagctagactcaactctgtgaatagaagttgctatactgtaagtaaagcaacaattcagaatactgaatgagtttaaattgttttatatagcacccttttgggctagggttaattactagatctgacttggataatttgacactttgggaaatgaactctgttcttgagacttgttcagtgtattttaaacatctgaggaagaaaacttaaatatgcacctatttatacctattctttctttaggtcaacatttaacacccactgcatacattaatttgtccttgtctgctcactccagcaatttagaccttaacagtcacaagagacgttcttctgttacaaagccttagtaaattaaggcagttttgattatattctaggtccacctatgtctgaagctaaattcagtatctaactgctaatgaacaagtttccaaaatactgtaaaaatacaattagtcaatttgagtaaatgcaaatatgatgagaaatcaatttgctatttggcctggcaaatgggaacagtaaaattctgctttactcttctctagtctccttgccccagctgcacccactaccccaaagttggcagttttgaggtatgattttcaaggaatttttttagtattaacatctccctctgagaactatgtacctaaggtcacgcatacaactagtcaattctgtttttattactctaactatgtagaaacagtaagtcacttaaaacaatcacttggctgggttttttcccctttgtgccacattgattcaccctgacccaagaactccagggaaaattctttaatgtcaactgggcaactcattaacctctctttaacatcaagggcttgggaaaaaaaaaaaaaaggttagccacaggaataacaaaaacctggaatttatctttcaggttttgctttctctttctcactttgtttaaagtatctcgtactcacagttcacaaattaaccttcactgtctctttcacattaagagcttatgcttaaagcatgccccccttttctaacttgctggtttaccataaactcccctaagtaataaaattcctaacccagtactgagagtcctccttctctgccacttgggcattattttactagtttttaagccatcatcgcacaagaatccaaaaacccttaaattttttaaccactggcaaatatgtacagcaaattaggttaagcatttaatctggctcatgctctatcatactaaatattcaggtttatcataaactccttaaaaaccatcaaaggtcaaccagaaactgataactcttgaaaggagcaaacaggtaagatctttggagtttaagcttttctgagatgtgttgtgaaaaatctaacgtgtttatcgtatattcaatgtaacaacctggagaatcacaactatatttaaagagcctctggaaaatgaggccagtacagtgtgactacatgtttaattttcaatgtaatttattccaaataaactggttcatgctgaccacttgtattcaactaa

SEQ ID NO: 75 - DNA, 5266 bp, homo sapiens
gcttaaaaatttctgtgtcttacacagaagatagaaaaaatagagtgtctccaattggatggattttttaaaaaatttggttattgtaatggatttattttttcttagagctgagctgattgtactttggccaactaatgggttaatactgtcaagggaaattagccctgactaaacattgccgctggctcatgaatgcactaggcttggggcagtataaaaactcagagaaatcagtgtgtaggagacacagaaatcagtgtcactcagtgacagaagcaacaataattgtgaaaaatacttcagcagttatggactcatctgtcattcaaaggaaaaaagtagctgtcattggtggtggcttggttggctcattacaagcatgctttcttgcaaagaggaatttccagattgatgtatatgaagctagggaagatactcgagtggctaccttcacacgtggaagaagcattaacttagccctttctcatagaggacgacaagccttgaaagctgttggcctggaagatcagattgtatcccaaggtattcccatgagagcaagaatgatccactctctttcaggaaaaaagtctgcaattccctatgggacaaagtctcagtatattctttctgtaagcagagaaaatctaaacaaggatctattgactgctgctgagaaataccccaatgtgaaaatgcactttaaccacaggctgttgaaatgtaatccagaggaaggaatgatcacagtgcttggatctgacaaagttcccaaagatgtcacttgtgacctcattgtaggatgtgatggagcctattcaactgtcagatctcacctgatgaagaaacctcgctttgattacagtcagcagtacattcctcatgggtacatggagttgactattccacctaagaacggagattatgccatggaacctaattatctgcatatttggcctagaaatacctttatgatgattgcacttcctaacatgaacaaatcattcacatgtactttgttcatgccctttgaagagtttgaaaaacttctaaccagtaatgatgtggtagatttcttccagaaatactttccggatgccatccctctaattggagagaaactcctagtgcaagatttcttcctgttgcctgcccagcccatgatatctgtaaagtgctcttcatttcactttaaatctcactgtgtactgctgggagatgcagctcatgctatagtgccgttttttgggcaaggaatgaatgcgggctttgaagactgcttggtatttgatgagttaatggataaattcagtaacgaccttagtttgtgtcttcctgtgttctcaagattgagaatcccagatgatcacgcgatttcagacctatccatgtacaattacatagagatgcgagcacatgtcaactcaagctggttcatttttcagaagaacatggagagatttcttcatgcgattatgccatcgacctttatccctctctatacaatggtcactttttccagaataagataccatgaggctgtgcagcgttggcattggcaaaaaaaggtgataaacaaaggactctttttcttgggatcactgatagccatcagcagtacctacctacttatacactacatgtcaccacgatctttcctccgcttgagaagaccatggaactggatagctcacttccggaatacaacatgtttccccgcaaaggccgtggactccctagaacaaatttccaatctcattagcaggtgatagaaaggttttgtggtagcaaatgcatgatttctctgtgaccaaaattaagcatgaaaaaaatgtttccattgccatatttgattcactagtggaagatagtgttctgcttataattaaactgaatgtagagtatctctgtatgttaattgcaattactggttggggggtgcattttaaaagatgaaacatgcagcttccctacattacacacactcaggttgagtcattctaactataaaagtgcaatgactaagatccttcacttctctgaaagtaaggccctagatgcctcagggaagacagtaatcatgccttttctttaaaagacacaataggactcgcaacagcattgactcaacacctaggactaaaaatcacaacttaactagcatgttaactgcacttttcattacgtgaatggaacttacctaaccacagggctcagacttactagataaaaccagaaatggaaataaggaattcaggggagttccagagacttacaaaatgaactcattttattttcccaccttcaaatataagtattatcatctatctgtttatcgtctatctatctatcatctatctatctatctatcatctatctatctatctatctatctatctatctatctatctatctctatttatttatgtatttagagatcaggtctcactctgttgaccaggctggagtgcagtggtgagatctgggttcactgcaacctctgcctcctgggctcaagcaatcctcccacttcagcctcccaaatagctggggctaccatggtatttttcagtagagaccgggtcttgccatgctgcccaggccagtctcaaactcctggcctcatgtgatctgcccacctcagcctcccaaagtacagggattagagttgtgagccaccgctgccagcccagagttaccctctaaagataagaaaaaggctattaatatcatactaagtgaaggacaggaaagggttttattcataaattaaatgtctacatgtgccagaatggaaaggaaacaaggggagacaacttttatagaaatacaaagccattactttattcaatttcagaccctcagaagcaatttactaatttattcttcgactacatactgcagcagaaccagcaatacacttgatttttaaaagcacatttagtgaaatgttttctttggttcatccttctttaacaggctgctgagtcactcagaaatccttcaaacatgattaattatgaagatgaaacactagagtcatataagaaataaaaattgggcaataaaataaaatgattcagtgtttcttttctatattgtcaatgaaaaccttgagttctaataatccatgttcagtttgtagggaaagaaaaaataatttttccttctacccactttaggttccttggctggggcccctataacaaaagacagattgacaagagaaaaacaaacataaatttattagcgggtatatgtaatatatatgtgggaaatacaggggaatgagcaaatctcaaagagctggcgtcttagaactccctggcttatatagcatcgacaaagaacagtaaatttttagagaaacaacaaaacaaagaaaaagagctttgagtctgtaggggcagcaatttgggggaagcaaatatatgggagtttgccttgtagattcctctggtgctggtctccaggctgacaaggattcaaagttgtctctgaaactcctctttgtcatactgcacatataaaacgtcttttgtttccaacaagaggattttctttttcattctagaattatctccttgataacttgatcagatataggacatgacactgaatagagtccaacagtacaaaaaaaattcagtatgttctagctacttcacacatgtgtacgcgacagttatttttacagtaaggtattttcgagaaaaatgcattacgtgttttggaaaatagagtaatttaaaaaatatatttgaaatgaaaatctccaacacattagaagatgatgatgttagatgcccatcgtgtgccacaagtggttttttcattatgtaaagcacccgttgaattaaaagaatttgtttttgttcaacctcttcctgaggcccaagagcatatgggcaattcggatttcctgctggaccacaaggttctgttgatattacatagaacgggtattccagacacttcttatgatgaaagtccaaaagtggcatccaatttaaggccccatctttcgttgccattcttcattcctacaaaggacgaacttggattacatcaactttggacccattggttttgtcgctgtcgtcaactgacagtgattcatcactggtgatgataaaaatgatggaagaagagttgaaagtcacttttttctttggcctgtccccatctttctgtgacatcacaatgggtctgatctgcatttcacttccagctgctggtaggtctttagcaggcctctggcacctcagcagtcggaggcacagaagctgcaaaagggatcttcgaaactgggcagagaaaaaataaagtggaatattaagtaaaagttgggcactaatctggattaacattcgaggaaatcagttgagctgaatttaagttgttttttgtttgttagcaggtgtggatgtggggttatgtggtcatgctcagatctacctaaatcaccccagagctttatgtcttttattcattctaattcttattaaccggaatatgtaggaccatttcaataccttgtaatcctccaagcttcaatctgcacacactttctatgagggcaggtacaactattaagagattttgaacattaagttagtccacaaatattcagtgggcatctactaggtgacagccactgtgctataattagagactttttactataagcatcaaaaacagataaggctcttcctggcagagtttacagcctggtgtacttgctaatgtctctttaattaggtgaagaattttttttttctatcgaaattactaatcagttggggaaaaaaatactatagcagacagcactaatgtcatcaacaaacattgttcttctccgtgtcctgggtacaacatcgaataatatttcttggcctcctttccgcttctcctctctgctgttcctctctacaagaacctgggaggccaacgcctaaagatcataatatcacacaatggaaggaacctagattcctaaatgactgcataggacagatcccatctcctccacccaatacattattagactgaactgtgacctgaaatgagcaataaactctgtattaattcactgaaatgttggggttgcttgttatagtagtcggtccatcatgaccagtaaaacataaatcaaaagttaatgtaattgttatcccattatttagagcgaaataaatgttgaatatatggactttctcagattaggaaataccaattaaaaatataataaatagctacattg

SEQ ID NO: 76 - DNA, 2162 bp, homo sapiens
cactccctgggctaaacagcatcaccatgtctgttcgatacagctcaagcaagcactactcttcctcccgcagtggaggaggaggaggaggaggaggatgtggaggaggaggaggagtgtcatccctaagaatttctagcagcaaaggctcccttggtggaggatttagctcaggggggttcagtggtggctcttttagccgtgggagctctggtgggggctgctttgggggctcatcaggtggctatggaggattaggaggttttggtggaggtagctttcgtggaagctatggaagtagcagctttggtgggagttatggaggcagctttggagggggcagtttcggaggtggcagctttggtgggggcagctttggtggaggcggctttggtggaggcggctttggaggaggctttggtggtggatttggaggagatggtggccttctctctggaaatgaaaaagtaaccatgcagaatctgaatgaccgcctggcttcctacttggacaaagttcgggctctggaagaatcaaactatgagctggaaggcaaaatcaaggagtggtatgaaaagcatggcaactcacatcagggggagcctcgtgactacagcaaatactacaaaaccatcgatgaccttaaaaatcagattctcaacctaacaactgataatgccaacatcctgcttcagatcgacaatgccaggctggcagctgatgacttcaggctgaagtatgagaatgaggtagctctgcgccagagcgtggaggctgacatcaacggcctgcgtagggtgctggatgagctgaccctgaccaaggctgacctggagatgcaaattgagagcctgactgaagagctggcctatctgaagaagaaccacgaggaggaaatgaaagaccttcgaaatgtgtccactggtgatgtgaatgtggaaatgaatgctgccccgggtgttgatctgactcaacttctgaataacatgagaagccaatatgaacaacttgctgaacaaaaccgcaaagatgctgaagcctggttcaatgaaaagagcaaggaactgactacagaaattgataataacattgaacagatatccagctataaatctgagattactgaattgagacgtaatgtacaagctctggagatagaactacagtcccaactggccttgaaacaatccctggaagcctccttggcagaaacagaaggtcgctactgtgtgcagctctcacagattcaggcccagatatccgctctggaagaacagttgcaacagattcgagctgaaaccgagtgccagaatactgaataccaacaactcctggatattaagatccgactggagaatgaaattcaaacctaccgcagcctgctagaaggagagggaagttccggaggcggcggacgcggcggcggaagtttcggcggcggctacggcggcggaagctccggcggcggaagctccggcggcggccacggcggcggccacggcggcagttccggcggcggctacggaggcggaagctccggcggcggaagctccggcggcggctacgggggcggaagctccagcggcggccacggcggcagttccagcggcggctacggtggtggcagttccggcggcggcggcggcggctacgggggcggcagctccggcggcggcagcagctccggcggcggatacggcggcggcagctccagcggaggccacaagtcctcctcttccgggtccgtgggcgagtcttcatctaagggaccaagatactaacaaaaccagagtaatcaagacaattattgaagaggtggcgcccgacggtagagttctttcatctatggttgaatcagaaaccaagaaacactactattaaactgcatcaagaggaaagagtctcccttcacacagaccattatttacagatgcatggaaaacaaagtctccaagaaaacacttctgtcttgatggtctatggaaatagaccttgaaaataaggtgtctacaaggtgttttgtggtttctgtatttcttcttttcactttaccagaaagtgttctttaatggaaagaaaaacaactttctgttctcatttactaatgaatttcaataaactttcttactgatgcaaactaaaaaaaaaaaaaaaaaaaaaaa

SEQ ID NO: 77 - DNA, 1735 bp, homo sapiens
agactgccgcagcgactcatcctatcgataaggttcagttagccaaggtggaggatgggaaaagaatggaactgtcccagctactcaatgagatcagggcaaactatgaaaagatcctcaccagaaatcagatagagacggtgctctcaacaaggatccagctagaagaagacataagcaaaaaaatggacaaagatgaagaggctttgaaggcagctcaagcagaactcaaggaggcccgacgccagtggcaccacctgcaagtggaaattgaatctctccatgctgtggaaaggggccttgaaaactccctacatgccagcgagcagcattaccagatgcagctgcaagacctagagactgtgattgaaggactagaaaaagagctacaggaagtaaggcgcggcatcgaaaagcagcttcaagagcacgagatgcttctcaacacgaagatgaggctggaacaagaaatagcaacttatcgccacctcctagaaaaagaagaaatcagatattatggttgtatccaaggtgggaaaaaagacaaaaagcctaccacaagtagagttggttttgttttaccatcagccattataaatgaaatatcttttactacaaaagtcccacaaaagtatgagaatgaaaatgtagaaacagtaaccaaacaggcaatcttaaatgggagtatcgttaaggagagcactgaagctcatggcactattcagacagagaaagtggatgaagttattaaagaatgggaaggttctttctttaaagataaccctcgattgaggaaaaagtctgtttctcttcgatttgatcttcatttagcagccactgatgaagggtgtttagagactaagcaggataatctaccagatatagaagtcaggcttatcatgagaagatcatgcagtattccctctatcaaacctccatcaacagctaattaatccaaagatagtatttgacttgattggaaaatgttaggatggaccaaggtgggccataccaactccctctgtcccaaaatgtaagttattacgtatgtatggaaaatgttatgatcaatatgtggttctcttcagaagaaaaaaacaataaaggacatttctctgaatctaattatggagatagacatatatatatatatatgaatgagagggagtagcttaaaaataaaatcacaaatccagtacagtctctttctttatattctcccaatagtcttctttttcccttgaaacttcatcagagactgtaagcattaacctggtttagtaaagtctttgtaatttttttcaatggctgaatacgctaaggaaaaaagaattgtttgaataggattgtgttaagagtcacactgagttattcaccattattccatgactggttaaacctacaatgtttgttctatttttcaaaaagagcaattataaacaagtttttaaagggggactcactattcacctaatgaggattcttctttttgagataaatcatttgtatactgagaaaaatgagttattttccatgagaaattctgagcaaactatagaacacaccccagggctaatttgagataagtacaattaagttaatctacatatatctaaaaggttttttttgtaataagtatctgatttccggaagatttactttactcaaggaactttaaaggttgtatcccccaccaaaaaaagaaaaaaaatcagaaggccaactgcgcaaacaa

SEQ ID NO: 78 - DNA, 789 bp, homo sapiens
acagcctctcccagccccagcaagcgacctgtcaggcggccgtggactcagactccggagatgaagcccctgctcctggccgtcagccttggcctcattgctgccctgcaggcccaccacctcctggcctcagacgaggagattcaggatgtgtcagggacgtggtatctgaaggccatgacggtggacagggagttccctgagatgaatctggaatcggtgacacccatgaccctcacgaccctggaagggggcaacctggaagccaaggtcaccatgctgataagtggccggtgccaggaggtgaaggccgtcctggagaaaactgacgagccgggaaaatacacggccgacgggggcaagcacgtggcatacatcatcaggtcgcacgtgaaggaccactacatcttttactgtgagggcgagctgcacgggaagccggtccgaggggtgaagctcgtgggcagagaccccaagaacaacctggaagccttggaggactttgagaaagccgcaggagcccgcggactcagcacggagagcatcctcatccccaggcagagcgaaacctgctctccagggagcgattaggggcaggggacaccttggctcctcagcagcccaaggacggcaccatccagcacctccgtcattcacagggacatggaaaaagctccccacccctgcagaacgcggctggctgcaccccttcctaccaccccccgccttccccctgccctgcgccccctctcctggttctccataaagagcttcagcagttcccagtga

SEQ ID NO: 79 - DNA, 4077 bp, homo sapiens
gccagtgagcccccgcgacggtggcccggacggaaaagatacctcggcggcgtgggcccggctccctgctccaggacctagggatcttggccttccaccctcctccgagcaccaggactccctccagttccgtacccgaggcctccgtggtgaagaggtgccggacccgatgagctcgggagtccaccatcgctctgcaagccgcagttaaacgagaagattcatcaccgctttgatggctgcctcacaaacttcacaaactgttgcatctcacgttccttttgcagatttgtgttcaactttagaacgaatacagaaaagtaaaggacgtgcagaaaaaatcagacacttcagggaatttttagattcttggagaaaatttcatgatgctcttcataagaaccacaaagatgtcacagactctttttatccagcaatgagactaattcttcctcagctagaaagagagagaatggcctatggaattaaagaaactatgcttgctaagctttatattgagttgcttaatttacctagagatggaaaagatgccctcaaacttttaaactacagaacacccactggaactcatggagatgctggagactttgcaatgattgcatattttgtgttgaagccaagatgtttacagaaaggaagtttaaccatacagcaagtaaacgaccttttagactcaattgccagcaataattctgctaaaagaaaagacctaataaaaaagagccttcttcaacttataactcagagttcagcacttgagcaaaagtggcttatacggatgatcataaaggatttaaagcttggtgttagtcagcaaactatcttttctgtttttcataatgatgctgctgagttgcataatgtcactacagatctggaaaaagtctgtaggcaactgcatgatccttctgtaggactcagtgatatttctatcactttattttctgcatttaaaccaatgctagctgctattgcagatattgagcacattgagaaggatatgaaacatcagagtttctacatagaaaccaagctagatggtgaacgtatgcaaatgcacaaagatggagatgtatataaatacttctctcgaaatggatataactacactgatcagtttggtgcttctcctactgaaggttctcttaccccattcattcataatgcattcaaagcagatatacaaatctgtattcttgatggtgagatgatggcctataatcctaatacacaaactttcatgcaaaagggaactaagtttgatattaaaagaatggtagaggattctgatctgcaaacttgttattgtgtttttgatgtattgatggttaataataaaaagctagggcatgagactctgagaaagaggtatgagattcttagtagtatttttacaccaattccaggtagaatagaaatagtgcagaaaacacaagctcatactaagaatgaagtaattgatgcattgaatgaagcaatagataaaagagaagagggaattatggtaaaacaacctctatccatctacaagccagacaaaagaggtgaagggtggttaaaaattaaaccagagtatgtcagtggactaatggatgaattggacattttaattgttggaggatattggggtaaaggatcacggggtggaatgatgtctcattttctgtgtgcagtagcagagaagccccctcctggtgagaagccatctgtgtttcatactctctctcgtgttgggtctggctgcaccatgaaagaactgtatgatctgggtttgaaattggccaagtattggaagccttttcatagaaaagctccaccaagcagcattttatgtggaacagagaagccagaagtatacattgaaccttgtaattctgtcattgttcagattaaagcagcagagatcgtacccagtgatatgtataaaactggctgcaccttgcgttttccacgaattgaaaagataagagatgacaaggagtggcatgagtgcatgaccctggacgacctagaacaacttagggggaaggcatctggtaagctcgcatctaaacacctttatataggtggtgatgatgaaccacaagaaaaaaagcggaaagctgccccaaagatgaagaaagttattggaattattgagcacttaaaagcacctaaccttactaacgttaacaaaatttctaatatatttgaagatgtagagttttgtgttatgagtggaacagatagccagccaaagcctgacctggagaacagaattgcagaatttggtggttatatagtacaaaatccaggcccagacacgtactgtgtaattgcagggtctgagaacatcagagtgaaaaacataattttgtcaaataaacatgatgttgtcaagcctgcatggcttttagaatgttttaagaccaaaagctttgtaccatggcagcctcgctttatgattcatatgtgcccatcaaccaaagaacattttgcccgtgaatatgattgctatggtgatagttatttcattgatacagacttgaaccaactgaaggaagtattctcaggaattaaaaattctaacgagcagactcctgaagaaatggcttctctgattgctgatttagaatatcggtattcctgggattgctctcctctcagtatgtttcgacgccacaccgtttatttggactcgtatgctgttattaatgacctgagtaccaaaaatgaggggacaaggttagctattaaagccttggagcttcggtttcatggagcaaaagtagtttcttgtttagctgagggagtgtctcatgtaataattggggaagatcatagtcgtgttgcagattttaaagcttttagaagaacttttaagagaaagtttaaaatcctaaaagaaagttgggtaactgattcaatagacaagtgtgaattacaagaagaaaaccagtatttgatttaaagctaggtttcctagtgaggaaagcctctgatctggcagactcattgcagcaggtggtaatgataaaatactaaactacattttatttttgtatcttaaaaatctatgcctaaaaagtatcattacatataggaaaacaataattttaacttttaaggttgaaaagacaatagcccaaagccaagaaagaaaaattatcttgaatgtagtattcaatgattttttatgatcaaggtgaaataaacagtctaaagaagaggtgtttttataatatccatatagaaatctagaatttttacttagatactaataaaatacatttagaaacttttaaagtcatgaaaaagcattaaccttctaaacagtatattctaaaaagtcaaaacgttaacaatagtttttatctaataaaagcactgcaagaaaatagggtagaattgttacagctggacttgtaaaaatatgtctttttactcagggtttaaaatgtcccatttaaatatgaaatgtaaacaaatttgttttttaaggttaaggccaaatgtaacaataaaaccctgtcgatggttttagctaaattagaggaagttgtatgagacttaatgatctaaaaacttaaaattgaattggtttgattaaaaataaagcttgcaattttaaaagtagctcacatttaatttcttgtgtgaaatagaacatgctttaaaggaagtatttttatgtgaatttgcattccagtataaatagtattcacaaaaaagattttcctagattttatctattgaataggtgtcaatatggcatgcatattgtaactttcattagaaataagttgctttgacttttaaaaatgacatagttagattatttaaagtcaatgtatatagtatatattatgtatggatttatataccaaattttggaatacagcctatctcatgaccatattgaaatgtacggaatttgatccatgcgatactatgtgtgcattatttgaaagttattggaaattttattcaaaccgtggaacaaatgtatgtgattttgttatacttcttaatttaaataaaatatttaatgcactattaaaaaaaaaaaaaaaaaaa

SEQ ID NO: 80 - DNA, 2903 bp, homo sapiens
ttttcttttgatagaatgtcaaacttacgaaaaaagttacaagaagagaacaaagagctattagagggtgttgctgacacaatgctttatcactcttgaatattttcgtgtgtaattcctacaaataaggacattctcccacatagccacaatacaaccatcaaaatcaggaagttaacgctgatgtgtttctaccatgtaatcctcagatccaattcaagtgtcaccagctgtcccaataatgtcttttataacaaaaacattcagtctaagatcactcattctatttagttatcttgtctattcttcaatttggaagtgttctttgttctttcctgaatgttcatgaccttgacatcttagaagattaaaggttatttaaagttgttgagttaaatatccattaaattaggtttgtcagatatttcctcgaaattagattcagcttatgcattttttggaaggaataccacagaagtgatgttgttttctttctgttgcatccaatcagatgatacaggattttgatttgttccattactgttgacatgaattttgaacatttgataatgccagtatcagccagatttttccattgtaaagtcattcctttgtcctttgtatttaataagtatgtttagggactttgagactatgtcaatgtcctgttcttcatcaaaattccactcactcattcttagtattcattgacgtttactgatcgaactaattattattatgatagttgccaaatgttggtttttctaattcaatcatttctttagtgtttattagcattctactataaggaaaagcactatcttctccccatttattaattcacatatttacatcagcttggagttattgatttctattttattaaatagtttataattgattaccatccttatttattttaatgctcaaattgtcccaaattatggccaaagaaagctccttcaaactggttgctatgtccttttgacatggcccatcattctttaaacacattttacatctggcacaataacgtgctacatacccatcttgtatttttcctgccccatctttgaaatcagccattctcaaggggttccttcttaatctggctgttgttgtgttggaactcctggtaccatcttagaaccttaaggagacaagcgaaccaagccaataagctttccatgatgctgcttagagttaaacagagcccaggtactaagttatgtcatggagacagtgaactaacctctggactgcttgctacatgagacaattgattttcttattttctatgtagggtggtacatttcctcattttgagatatttcttcaacatatagcttttcattagtggggattttgtcaattataaccaaaaacaatgtgacggatacccaagatgtttcatgttgtagcttgggtgaattacacatttctgaagccattacacttcctagtttatttggatttaagttgacaaataaaaattgcatatgtttatggtctataacatggtgtttcgatatatgtatacatcgtggaatggctaaatcaagctaacatatccattacctcacatagttattttttgtggtgagaacattttaaaaatattgtcttagcaattttcaatcaagcctgtcccatggagacacaagcaatagtgacatgagcacttgactcgctgggttatcaggctttggctccaaatgtttggcttcaaatatgaaaaagttacatgaaagatgaaactatgcaatggcatggctgttggtcattcacatctctctctgccaagaatggagatgacgctgttgaaggaagaaatgtgttttctcctttttctcaagtgatatttgccttaggtcagattctactagtttaaagcaaaacgatctcctggtctgattcctttgggtctctaataatggaaactgcaaggatcagcataaagtgttcctttgttctgacgttggtataacattgcttcttgaaaaatgaaagtatttggacatgcagacagaagcaatattattcaggtcttccttgttgcaagtgagggaaatccaattaaaactggtttaaacctaaaaaaaaaaaaaagaagaaaagaaaagaaaaaatatgagaggggttttgctttctggaatctgctttctagtcagaaagtgcagaagaagggctagcttcaggaacaattggatgcagtagttcaaatcacaagttaagtctctgcttcttttctccatctctcttctgtcttcctccacactggctttattcttaggtaggcttacccagatagtcataaacacagccaccagtggcagctgggctcacttttgtccttggagccagtgagcccatgaaaaaggagcttctctttctggagcttcccaggggtaactttgatcagccaacaagggtcagtcctatgcttatcccttgaccaatctctgtgcccagagggcagggtactctgattggcaataccttcatcgtgggccaaccactgtggggaagggggagggattagaaaagacagccacacccaaatctcatgaagcagtcccctttattttaaaaaagtccctgtgagagcaacaggagcaaagcatggagaagaagcaatcttggagaagctggaagagaaccgacccaaagaatccaagagactaagactgtgcagggttggggaacggaagctcacacaggaggcctggacagagctgcagcagagccaggagagaagccaagtggcacagctcatcttgaagtaattataatgccactaaaattctcatttgtattaattttttttaattactggcaagataaggcaaatgtttttaaaggcctaaataaaatgatattccctgaaaaaaaaaaaaaaaaaa

SEQ ID NO: 81 - DNA, 219 bp, homo sapiens
atggtggtcctggggatgcagacagaggaggggcactgcataatgctgagagggctggcaccctctctaggtggaacacaggtaatttgtaaagttgtaggtctgccaaacagtattgtattcaacacatcttctcaccttctctttccagccaccctccagggtgccctgactcaccttccctgcagatggaggtgaggttccacagacaaaccccct

SEQ ID NO: 82 - DNA, 930 bp, homo sapiens
ggttgaaagatccttcagtaccagccaactctctctcctggttccatgttcactctgctactttctaattattactccaggttggagggatggatgatggacaacaacttttctcatcactggaagggcatgttccccactgaaactgaatccactgttttttgtttgtttgtttatttgtttatttttgtttttgagacagcgtctggctttgttgcccagactggagtgcactggtgcaatctcggctcactgcaacctctgcctccggggttcaagagattctcctgcctcagcctcccaagtagcttggactacaggcacgcaccaccatgcctggctaatttttatatttttagtggagacagggtttcaccatgttggccagactggtcttgagctcctggctgatctgggagccacagcaggggtcagggccctgtgatccccagcctgaaactggcagtcagatttcacaggcttcagaccacagaggagcactaggaccccaccagaggtggtccggaggctgacctgaaggccctggggatgggctatgcaagctgattgctcactgcgagtagcaagagtatgtgtttttctggaaggaatgattggaatatccaaggacatgaggggagaagaaagcggtaaaatggcatttgctgtaaaagagtgggaaaaaaattgaattactccaaggttcgttgtgttcttccagctccatctatgataaagagaatgaacaactaggtgttttccttctggacaatgattatgacacagattactgctgggaccagaagtattgccactttggacaacatggaatagaaggattattgagaatcacttataatgagatgttacttcaaattaggaaaaatttgataaacaaatttataatacaaatgattataaaaacctaaa

SEQ ID NO: 83 - DNA, 1234 bp, homo sapiens
aaagacttccggtcggcgtgagcgtgaggtgtgggtgttcgtttctcaggtaaaacatggctaaaagcttacggagtaagtggaaaagaaagatgcgtgctgaaaagagaaaaaagaatgccccaaaggaggccagcaggcttaaaagtattctcaaactagacggtgatgttttaatgaaagatgttcaagagatagcaactgtggtggtacccaaacccaaacattgccaagagaaaatgcaatgtgaggtaaaagatgaaaaagatgacatgaaaatggagactgatattaagagaaacaaaaagactcttctagaccagcatggacagtacccaatatggatgaaccaaaggcaaagaaaaaggctgaaggcaaagcgagagaaaagaaaggggaaaagcaaagcaaaagcagtgaaagtggcaaagggtttggcctggtagactcttaaaaccttggaaaatgccacatgggatagatgacggattagaatgtatacacatgtatactttgatttcaactgccaccaaatgaaaaccatttgttttcctattttaacttggccttttttcttcaattcaaacccagcataactcctcaagtttgttttgggaacttgaataaaatattttctttgatacatccaagctctactgatactttaactggatgctacccaatatccagttataatcaggcctcaacgttctgtcaggtattaatatggttagaattgttcttacaactggtaattatagtcaatagagataaaacagatgatgtactgacaaatttttgtgaacttagattttaaagaaagttgttgtataatcatatcatttaaaaatactacattagggctgggcatggtggctcacacctgtaatcccagcactttgggaggccgaggcaggtggatcacgaggtcagttcgagactagcctggctaatacagtgaaaccccatctctactaaaaatacaaaattagccgggcatgggggcgcgcacctgtagttccagctactcgggaggctgaggcaggataattgcttgaacccaggagatggaggttgcagtgagccaagattgccccactgcactccaccctgggcaatggagtaggactctgtctcaaaaaaaaaaaaaataatggatcttataaagtacttgtgtggagctttgattccacagaataaaagatattttgtgtgtaaaaaaaaaaaaaaaaaa

SEQ ID NO: 84 - DNA, 2338 bp, homo sapiens
agcttcaagcctgacgttctaggggggagccgcttcttaagtacgtgctaggatcaagggtgcatttgcaaacttttcaaaatgccttagaggagtcctaaccagccccagggtgtctgaggcacgctgcccacaggacacttgctctctctttcttgtgaccccaacatgtcagctggcaagactcaacattcctgtctgggactgagcagcttgaaccacttgtatgagtcacagaaaaggagaatcatacccccattccaccaccccactccaacccctccactgtggctccaatgttacagaccactcctaacttcagtcccggaagaatggaaggaaggctgcaacttaagagactgcggttagaagtgatcttcataaattgtttgccttgcctgtgtctagagtccttaagatggagtgaaggtacctgagcgcaggaaccatggtcttcattgctgcctcagcattagcggaagtgccacgggccggctcccagggggccagagtttcccaggaacaccattgagtaccactgaactagagtctgcaagttaaagtaaggcaagaaggaaaaccggaaacaactgtaaaaacctgacctttcgtcaccttaatactggccatcatttatcgagtgcttattatgtaacagacattgttctcagtgtgtgagtgcagtgttcctcaaacctaaatgtgggcctgaatcgcagcggatcttggtaaaatgcagtttctcattcagtacctctggggtgcggcctgagattctgcatttccaacaagctcccaggatactttgtatagaaaggctttggtgtattaactaactcgatcttcttaataatcctatgaaatactactgctattcccattttacagatgaggaaacagaggttaagcatatatgaacttacatcaaaataaatagactgcagggcaaggagggaggggagaatagtgtgggcagtgtacagtgcagaaacaaagttctaggcagaggaaaaaggatttacagaaagcctggcatacagggcagggggacggggcctgcacacggggctgtttcaccgttagacgttataagcacagtacttggggctatgggcttcctgaaggtcccaagtatttgagacctgaaaaaaatttattgacacctacataggaaaagtgaacttttaaattaataattccaaaattcaaatcacgaattgtttcaaaaattttacatgatagaattcatatttagtaagcgatacgggtatattttaatgcatttgattttaaaaacggggtagggcctactaagaacaggccaagccctggccccagtgggtttggatataatcctgagggcagctgggaaccactgagagaagcaggagaatgttctctgtggctacagtgaggagaatggattggagggaggccagactggaggcccagtggctagagaccagataggcagttacagtcttccagactgcgagacaatctctctttagtgccaagattagcataaaatcatagcattatataacccaattattctttgattcctgcatccccaatctgactcagcattctaaatttacttaagatctggggacaagggtttttggcaaatccttgaaggcaaatgatgttacagtcaatcagtatatgccttgagccagacagacatgggtacgggcctcagttctgctgcttgctagctatgtgactttgcacaagtgatttaacttctctgggccttggattccttactggtaacacgagcataatcgattcctcacagaattaagtgagaaaactatgtatgtaggacttcttatggagtgggtacttagaaataaatggtagccgttatcatttatgtgcctttgttctgaaatctgcttaagttttctctaggaagtaacagagggtagaataaattatttagtattttcatcaatcttctgagataaaaattattatcctcattttgcagataaggaaaagggctcagagattagatcacagctctgtgaagtaggggcacaaagtggtcaacctggaagagctggactttattttgcttgcacttctgtccatgcactctctccagcagttgacatttgccctctttgatggctccacgaccaatttcccttagtcatggcatgagtcagctgtgagggctgatggcacaccaccgaatactctgctgtggcgccactagcctccatttaccttcttctccaacgttttccagcctccctcataccttgccccccagttttatagcttctggattttccttattaaagagcttgtttctgagactcag

SEQ ID NO: 85 - DNA, 2129 bp, homo sapiens
aagtactgcattcaaagaaatacaaacacaaccagaaagtattataagtctatattcagcatttcaaatctgtcctgtctatcaaggaaacaccgaaggaggaggtaaattcttaatgcatagcagacatttaaaaattctctctcaccattgctgcccagtcactaccctgcatgtgaatgccagcttgtctcttgagttgtctctttcctattctcaacttccacccccaaacacatttagagcacaggtcttttctgtcacacttgccagtcttccttgcctgctcttattatgtaaatcaaattcaccactctgtcctgttttgttttcatctctgcttcactcaataccccgactccctcaggaccgtgttgcttctgccctgaatgagttcttttctcccgggctgcagggaccacagaggtcttcttcctattacttcatggactgtatgaattccacccagctggtgacatcatggcaggtggtttggagatgaactggtatcctgccctgtgttaaatgtcctcagactggagctcagaacttttgagtattttcaaaagggtcaccgtgtctccagagaaatgctcccaacagtcctaactgaagtcagcactgaactgggcaaaggactcaagaaaaaaagtttccttcctcctcgatgtgttgctcaaagcactgcgtgagaccacacggagcagtatctaagcattgagcaacactcagaagggcagcaggacaaatgcgtagctgctaatgacccctctcctgccaatgctttcctccctcagccccctctagggtcaccgaacagctgtaaatacaagctgaccaccctcaaggagctgggatggagggaggttttctccagtctccagttctgcctttgcacctctgtggcctctcaaatgctcagccagtattttgagtacacccaacctcacccaggagatatatgtcacccagaaacatgtgctctccagaaagtcttcctgacatcatcggggcagtcctcctccacctcctcctcttcccagcaattcgttctgcaaattaatgccatccaaacaatcctcgagaactatctaggaaaggacgaggaccaaattaccaagcctttggatctaatccatgtggcatcccatctgtgagctccagggagattcaaagttggccagtgctggaggccaatcatatttataccatttccatatggcaccttttgattgagacttggcaagcacatgatcggattggaggaagacagagagcaagacgttggaacaagcagcaggggtggagcctgggacacaaggtcagcacatagcaagcccttgctttggagcagaggtggccggtttccagggcagtgagtatttgaggcagtaattgtgatcttcagcttcactggtgcaagtatcacctgtgagaaagcaggcattgggtgtgattaattagtatgcttctttagcatatggggtgagggagggacaggggctaatttgagcagtcagggacaaggagtcaacatcagtgtggagtgataacgtttgtacaccaagctggtaaatagacatcctagttacatatgattctattggcattgcctacagaggagaaaaaagtgatcaagtggttgtggattttatgtttgcttacctgttttttaaaaaaaaggtgaataaggaactttataaagatgttggattccagcatgttagacattgtagtggattgaattttgatccccaaaaagatatgtcccaagtcttaacctcacagtagctgtcaatgtgagcttatatagagcctttgcaaatgtattaagttaagcatctccagacgagatcatcctggattcagtgtgggctctaaattcaatgactggtggtggtataagagaaaggagagagagacaaacagacccagagacacacagaggggaaggccatcagaagacgaggcagctattggagttacgcagccagagccaagggatgccagaagccaacagaagctggaggagtcaaggaaggattctcccctagaaccctggaagggactgtggccctgctgacgctttctgggctccaaaactgagtgagaataaatttctgttgttt

SEQ ID NO: 86 - DNA, 1489 bp, homo sapiens
ctttgaatgaggctttttgcttttatattcttggatgccccaagggtttgaccttgatataagttgagtttagtcgactggcatagtttcttgatgatttctgggtaccaaggctcagctcagcactcctggcatgcatgctataaccctggggtgttaggactaggcacatgactttgttctctgtctcctcgaggttaagcacccattgcactggtggggccaaggtgttcccggtctgctgggcaacaacactctgatggtggggccggcaaaagtgcttggttggggtggtgacagtagggtggtaaggcctgcatatacattggaaaagccgtcgggggaggctgtgggtgacggtgtcctggcaaaacagtgcggggaagctgtgcgtgggtggatgctggtggaggcccatgtgcaggtgctctctggtggttacctggggcttgccagcaaaggagctatagtggtggctgtcgggaagtgctgcggttgggcatcagcgtccattgcaattggatgtggccaggcagggactgtggaacaggcaaccagggatgggggttggggggggcgctcaaatctgacaagccctgtgccatgggcaagatagttctgttctgtctaggtccaatagtcagcaaagaccaaagctacctagaggtgtgtggtgagctttgggagatggacatacctggccatgctccactgcagccattcccacaccaggccttctgggctccgtgcagactggagtcctgtttctgccaacttcccaagcagctgtctttgcaacctcaaatgtctgtaggggtcatggagcctccttcagctaggattctagaggtccatgacaagaacaggctactccatgcctgtttaactcatcctttccccaggagcatttggggtcagaatgagtcatggtgctaggggagctccctgtaaggttcccagctttctcctccttcagcccaggatccgcatcctccttctgttcactctcagtgccttccttccaaagatctgctcagagtgtgctggtcttcttgatggcctggtctcttggtggtggaagctcttcctgactctgtgtctacttggccaccctgactcctctctgttgtctgttcactgtatatagtgtcatgtgaggaataaaagttttaacatttgacgaagtccaattcacctattttttttcttttgttgcctatgcttttggtgttatatccaagaaatcattgcaaaatgcagtgtcacagaactttctccctatgctttattctaagttttatagttttcagttttacatttagctcttggatccattttgagttaatttttgaatatggtataagcctgtcacacaggctggagtgcagtggcgcagtctcggctcactggaaactccgcttcccgggttcacgccattctgctgcctcagcctcccgagtggctggtactgcaggtgcccgccacaaca

SEQ ID NO: 87 - DNA, 1110 bp, homo sapiens
gggcttgcctcctcctgcgtcctgctagctatttttaaatgtgagctctattttgttccaagatcattaggatatttagccccttcaccaatttccacaagaaaattaattcattccaatattcagaggttccttttttatttcttagccagtgattaaggaatccattatgtaacccagagccattctctctactcttttcttaatttttccttctaaaatggggagttccattttcttaatttttcattctaaattggggagttccaaattttttttctctctctctcttaggcaaagcagttcatgtccttcctggaagttttagtatctgccagtactgatgcccagtttgcattttaaaagctccttctagctgctagatgctgaaaagactgaaaggaggcaaggggataggcaaagggaccagtatcaggttattttaggagatgatggtggcttgaaccaggtagtggcaaagctcgtaaagacaagtgcatgaataggaatattttggaggagatgctgcagtacttgcttatagattggattgtaggtgaccagtttgaaattcagctaaaccagcagctatggtccctcatccccaacaacgatgtgagaaggcttgtttctcatgttatccggaccttgaagacggactgcactgagacccatttgcaactggcctgtgccaagctcatctctaggacaggcctcctaatgaagcttctcagtgagcagcaagaattgagaactgtatcaatgacagcatggaagcccagaatgaacagaaagagcagaagtcgaatgaggtcctgatatggaagaaactactgatgtcagctgaaggaccacactgatgcagctgtcctgaaggactccccgaggagctacctcatcaaaaaatacagtttccactttgcgatgattttatcccccttgccccaaccgaccagcaaccccaattttccagcccctcactctccacaatcctcttaaagccccaggccagaacttcttgggagacagatttgagggtttccttccacttccttgctgggtggcctgtgatcattaaactctttctttgctgcaaaaaaaaaaaaaaaa

SEQ ID NO: 88 - DNA, 4733 bp, homo sapiens
gtacagaaataatggacagtgaatgccaacattatgatatacattgccctctactttcctttcaggtggatggctggtactctttgccatcatgttgcggttggtggcagcttgccctgagtcatgtgtggtgtgcaccaaagatgtaaccctctgtcaccagctaacctatatagtagcagcccctatgaccacgagggttttaatcatcaccgatggatatctctcctctattgagagcacaaacctgtctctcttgtttaatcttgccctgctctccctaagcagaaatggtatcgaggatgttcaggaagatgccctgcatgggcttacgatgttgcggaccttgttgctggagcacaaccaaatatccagctcttcgctcactgatcacaccttcagcaagcttcacagcctgcaggtactggtgctgagcaataatgctctccgcaccctacgagggtcttggttccgaaacacaagcggcctgacccggctccagctggatgggaatcagattactaatctcacagacagttctttcggaggcacgaatctccacagtctcaggtatctggatttatccaacaattttatttcctacattgggaaagatgccttccggcccctgcctcaactacaggaagtggacctttcccgaaataggttagcccacatgccggatgtgtttactccactgaagcagttaatccttctgagcttagataagaaccagtggagctgcacttgtgatctccatccccttgctcggtttttaagaaactacattaagtcttctgctcacacgctcaggaatgccaaggacctaaattgccagccatctaccgcagctgtggcagctgcacagagtgtgctgaggctgtctgagaccaactgtgattccaaagctcccaacttcactctggttctaaaggacagaagtcccctcctcccaggaccagatgtggccctgctgactgtccttggcttcgcaggagctgttggtctcacttgcctaggtttagttgtatttaactggaaactccaccaaggcaaagcaaatgaacacacatcagaaaacctttgttgcagaaccttcgatgaacccctgtgtgctcatgaggcaagaaattaccacactaagggatactgcaactgccacttaactcaggaaaacgagataaaggtcatgtccactgtggggtccagaaaagaaatgccacttttacaggaaaatagccatcaagcaacatcggcctctgagtctgcaacccttgacggatcatttagaaacctgaaaaagaaagaccgtggggtaggcagcactttattttgccaggatggtagattgctgcattcggaatgttcagagcctcctggaaatatgagagcttttaatgaagcaggcttacttacaacatataatccaaggaaagttcaaaagctatggaatcttgagcctggagaagtccagcctcaaactctgcaacaccatataataagaacagaagatatcagcagtgacatatttagaagaagatatgcaacacccgcttcagccttggcaggagaaagtcttgagaagcgtttaacaaatgaatcatggcagcctccaatagaaaaagaagacaatggcttacaccctcataggcaaagacattttattacaagctcatcatccaagccttgtgagcctgaggaacactatgtacaaaagatcgtacaaaaaaatagatcaaaatatgatgatccttgtggactgttaaaacagagcaaacctaggtattttcagccaaacaattctcttatctgtaaatatgtgccctgtgagcaatttgaagattacatgaaagaaaagaagccaaatcgtagacaacactcaaagcctgagaaagagcaaatccaaattaacagtgcaatagaaaaatttcttatgagtgaggacaacatagatttatcaggattatcaacaaaaaccaagaaagcatattccccaaagagggttatcttccatgatcctgatttagtagaaataaataggtcgatgatgtcacccaaaatatcaaccccttggaaacgacagaaaaatcaaagtaaccaactgactaagttggatgttaaaaaatttagcaacactggggagagaaacaaaggagaaaaatggtttactaattcatgggttctgaaaaggaagagaacccctcagtctgacctcaaagggaaaattaaaggacaaaacttaaaattaaatttacatccttttagaaaagtcagagtccatccagaaaaatccttgtcaagtctcccaaagcaatgcaagcaggtattgttgcctcctaagaaattatccaaaacttctgagacagaagccaaaataaatactgtgtgttctgcagattttcttcaacagtcagagagtagcaactatgttagactcacttcaaagaggctgcctctgaaacatgactcaaagcagaccccatattatcaacgaaacactaaacgtgcccccctgctcagtgctaacaacttgcgtgtagtcaaccagagctctatagaaagcagctgttactcagctggccacattcctgatggaaacacatcaaaattgccccaacctacacccactgatgctgagcacaggcactcacattctcaattctcaactgagcaaatggaagatgcaactcagcttgaatcaaaagtgcttagttatttagcaactacttgggaaaatacaggaagtgatgttttaccattccaacattccaggagggctactgaccaagggacaacggagtccactgagcacatgggacagaatgtatcaaagaccagtgagttaaatcagttttctttgtccccgaggaatcaaacacaacttttagatgctcacaagactgacagctacaacaaggaatacactttagaccaaaatgaagccttacaacacagagagcaaaattcaagtcatgcacagcttgaaaataaagaaaaaacattaatgacaaaaccccaaatatcacatcaaattgtggaaaattgtattatggataaggaagaaaatgatgtagaaaaaaaactttcaaaaacagaaacttatgattcctctctcattccccaaacacaatccaagaacaacctatcatttatgaagacaaattcaattccataccaaaatagaatagaacttcccaaggatatcagtacttctcctgttagtagtcaagccgtttggcacctaaccaatagtagcgaaaaaggaattgacagcacaaatgcattgcccagaaatgacggcactgaagcactagagataaaaatagtagggaaagaagagaaaaatatgcttgatgaaagcaagacagattctagtatgttaactcagatctcacaaatgaccttaaaaggcatcacaaaagaaaggcagcaaacttgggaaaatggaacaagtgaaaaatatatattacatgatgcaagctctgccgaggagaccattacagctaaagatttaagtatcacaagttcccatgaaacccaaaatagaatactttgcagtgaagtagatcctgaagttaacagtaatgtacataattttagagaagttcaaaatattcaaccagataaagatagtgcacataaagaaggcgcaatgacagtggagacacatgaagcgctttccttcttaccagggttaaaagacagttttgaggcagaaaatgaggtgtttttagttcctagcagaataaatgaagctgaaaactctgctccaaaacctgtactgtatccaccatctgctgaatatgctactacatcacctttagaaacagaataaagtgaacaaaataactcaaataataatccttttctactttagctttcttcaagaggacaaacacccactagcctttgcatgcattagaagtggatcattttggaggacaacaacgtcctcagtaactctttgttatcaataaaataaaaccagagttgaatatatgacaaaaatcaaagatggagtcataggatacgtctgacacaattaactgagtatgcttctctaaggaatgaaaaaacaagtaagaaaagttttgccaagtcttgcaaaagcaagcaaacattgaaaaaaaaaaagccttaaacaaatgaaaaactacataagaagagtatttgagcagatttacatttgatgtttatttcatgtaaattattatacatatctcaattagtggtattacaatattgctttctacatggataattatatattcatatttgtgtttgatctgttttcctaattatagtatgaaaataaaaattcagctttgttaactgtagtgtaactgatatgcatattggtatgtttcatacatttgcaattgtcctgttgacaatcatcccagatttaagtagaagtctttaaaacttgttatttctctaagagaaaaaaattaaggatttccagggatagttggctgttcccataaagatctgcaaaatcctatatatccactaggtggagatctcagcttcaatcattttagaagaacagggcttgaagatcgacacaatggatcctgaacaaaaggaattttaatgagctttattgccaattgttattaatttaagattttgaaaactaaataacctattagtgcatagctttcaaggtctgatctcttgggtttcgcatgccactgttgtttggagtgagaactcctccttatacactg

SEQ ID NO: 89 - DNA, 1474 bp, homo sapiens
agtcgcctgaacccccagcctgtggttctctcctaggcctcagcctttcctgcctttgactgaaacagcagtatcttctaagccctgggggcttccccgggccccagccccgacctagaacccgcccgctgcctgccacgctgccactgccgcttcctctataaagggacctgagcgtccgggcccaggggctccgcacagcaggttctccccatgacaccacctgaacgtctcttcctcccaagggtgtgtggcaccaccctacacctcctccttctggggctgctgctggttctgctgcctggggcccaggggctccctggtgttggcctcacaccttcagctgcccagactgcccgtcagcaccccaagatgcatcttgcccacagcaccctcaaacctgctgctcacctcattggagaccccagcaagcagaactcactgctctggagagcaaacacggaccgtgccttcctccaggatggtttctccttgagcaacaattctctcctggtccccaccagtggcatctacttcgtctactcccaggtggtcttctctgggaaagcctactctcccaaggccacctcctccccactctacctggcccatgaggtccagctcttctcctcccagtaccccttccatgtgcctctcctcagctcccagaagatggtgtatccagggctgcaggaaccctggctgcactcgatgtaccacggggctgcgttccagctcacccagggagaccagctatccacccacacagatggcatcccccacctagtcctcagccctagtactgtcttctttggagccttcgctctgtagaacttggaaaaatccagaaagaaaaaataattgatttcaagaccttctccccattctgcctccattctgaccatttcaggggtcgtcaccacctctcctttggccattccaacagctcaagtcttccctgatcaagtcaccggagctttcaaagaaggaattctaggcatcccaggggaccacacctccctgaaccatccctgatgtctgtctggctgaggatttcaagcctgcctaggaattcccagcccaaagctgttggtctgtcccaccagctaggtggggcctagatccacacacagaggaagagcaggcacatggaggagcttgggggatgactagaggcagggaggggactatttatgaaggcaaaaaaattaaattatttatttatggaggatggagagaggggaataatagaagaacatccaaggagaaacagagacaggcccaagagatgaagagtgagagggcatgcgcacaaggctgaccaagagagaaagaagtaggcatgagggatcacagggccccagaaggcagggaaaggctctgaaagccagctgccgaccagagccccacacggaggcatctgcaccctcgatgaagcccaataaacctcttttctctgaaaaaaaaaaaaaaa

SEQ ID NO: 90 - DNA, 638 bp, homo sapiens
cctgctcgcggatcccgagtagagaacgcaagcacccacgcccgcctgcaagctcccgggcgcccccggcctctcctgctcggcggaacgaggataacccagtagagccggacccagggatattattgataataaggcctctgtaaccatggctagttctgacgtaaaaccaaaatcagtaagtcatgccaaaaaatggtcagaagagatagaaaatctgtacagatttcaacaagcaggatatcgggatgaaaccgaatatagacaagtgaaacaagtttctatggtagatcgttggccggagacaggatatgtgaagaaacttcagagaagggacaatacgttctattactacaacaaacagagggaatgtgatgacaaagaagtccacaaagtgaaaatttatgcttactagcctgtcttctttgtattacttgtcaattatattttaagtattcatcatttccttctacatcatgtgtttgtcatttgatgaaataattcaagatgcagtctgcagtttaatgttttgtgaaacacaaaagccatgagaattggtatctgctaatcaccttgtcctgttctaagaactggctgcagatgcattaaagttgtactttcttggaaaaaaaaaaaaa

SEQ ID NO: 91 - DNA, 2519 bp, homo sapiens
gtttccggctccggtgtcatggccggctcctaccctgaaggtgcacctgcagtcctcgccgataagaggcagcagttcggaagccggttcctgagagatccggcgcgcgtcttccaccacaatgcctgggacaatgtggagtggtcggaagagcaagccgcggcggcggagagaaaagtccaggagaacagtatccagcgggtgtgccaggagaaacaagttgattatgagatcaatgcccacaaatactggaatgacttctacaaaatccacgaaaatgggtttttcaaggatagacattggctttttaccgaattccctgagctggcacctagccaaaatcaaaatcatttgaaggactggttcttggagaacaagagtgaagtacctgaatgtagaaacaatgaggatggacctggtttaataatggaagaacagcacaagtgttcttcaaagagccttgaacataaaacacagacacttcctgtggaggagaatgtaactcagaaaattagtgacctggaaatttgtgctgatgagtttcctggatcctcagccacctaccgaatactggaggttggctgtggtgtgggaaacacagtctttccaattttacaaacgaacaatgacccaggactctttgtttattgctgtgatttttcttccacagctatagaactggtccagacaaattcagaatatgatccttctcggtgttttgcctttgttcacgacctgtgtgatgaagagaagagttacccagtgcccaagggcagtcttgatattatcattctcatatttgttctttcagcaattgttccagacaagatgcagaaggctatcaacaggctgagcaggcttctgaaacctggcgggatgatgcttctgcgagattacggccgctatgacatggctcagcttcggtttaaaaaaggtcagtgtctatctggaaatttctacgtgagaggtgatggaaccagagtttacttcttcacacaagaggaactggacacgcttttcaccactgctggactggaaaaagttcagaacctggtggatcgccgactgcaggtgaaccgaggaaagcaactgacaatgtaccgggtttggattcagtgcaaatactgcaagccccttctgtccagcaccagctgagaggcacctgctgccaacacgatgcaagcccattgtgtttccgggcttttttaaaaaaaaaattgtagcactgggcgtggtgcatgcctgtaatcccagccactcaggaggctgaggcggggaggatccattgagcccagcagtccaacctgggcaaaatagtgagagaccctgtatctgaaagtaataataaaaataaaaaatataaatgaggtctcgttgatgttggacaattcaagaattcagacttgaaccttaaacctaggaaaagttactttgtatcaggattctaacaattatgcttcatatttgtgaagtcctttaaaacataattttctcaagttctttctttgagatctcaatctgtcttagcattttgtaactaataactgaaattttattcaaaggaattgtaaaccttaaaccaccaatttatttccatgtgaaaaagtgttacatatgacaagtgttttttgactgtaattgcgttaaatcttttgagaatgtaaatgccgggctaggcaattgcagttaatacatacagaggttagtgaagggcttattaagttgtaggggaagcaagctgggaagaatcagatcagatattttcctgacaaaaaaaaatgaccctacagagagcatcaaaatgtggtgttcttgttaagtaattgatcgtggtcttcgctttaatcttagttccgccaggcacggtggctcacacctgtaatcccagcactttgggaggccaaggcgggcggatcagctgaggtcaggagttggagaccagcgtggccaacatggtgaaaccccgtctctactaaagataaaaaaattagctgagtgtgttggtgggtgcctgtaatccagctacttgggagactgaggcaggagaattgcttgaacccaggaggcagaggttgcagtgagctgagattgtgccactgcactccagcctgggcaacaaagcaagactctgtctcaaaaaaataaaaataaaaaaaaaatcttagttccatggaattttaagcattgttccccctctaacctgtgtctaaagaattaaaagaatttggccgggtgcggcagctcatgcctgtaatcccaacactttgggaggctgaggcaggcggatcacgaggtcaggagatcgagaccatcctggccaacacggtgaaacctcgtctccactaaaaataccaaaaaaattagctgggcatggtggcacacacctgtagtcccctgtagtcccagctactcgggaggctgaggcaggagaatcgtttgaacctgggaggtggaggttgcagtgagccaagatcatgtcactgcattccagcctgggcaacagaggaagactccgtctc

SEQ ID NO: 92 - DNA, 2728 bp, homo sapiens
gggccggagggccgcggtgtgccgcggggcagttgcgggttgtcataacggtccccgccggagtgaggcgaggccgcgtcgctcagttctggccgtctagggcccctgtaaggatgagagcgcagaggacgcagggccgctggaggcgcaggtaacgaagctagggtgcggttgggaccgcggctgagctttttccgggacccgtggtgctgaatggagaggacggagacgaagccgagccgcggctcctagcggcggcgccgatgctcgagctgtagctgccaggcgaggatgtgtggagcgcaggcggcgcggggtaaatgagaggtctcgggccccaggacccccggggcccgggatgagttagcgagggcagccgcgggggccagttccgaccgtgacaggccaaggcgacggccgccgcccgcccgccccttccgtgcagaagcagctgctcctttccgcgcccgcccgcctgcgctcccggccctggagaccatgaggttccgcatctacaaacggaaggtgctaatcctgacgctcgtggtggccgcctgcggcttcgtcctctggagcagcaatgggcgacaaaggaagaacgaggccctcgccccaccgttgctggacgccgaacccgcgcggggtgccggcggccgcggtggggaccacccctctgtggctgtgggcatccgcagggtctccaacgtgtcggcggcttccctggtcccggcggtcccccagcccgaggcggacaacctgacgctgcggtaccggtccctggtgtaccagctgaactttgatcagaccctgaggaatgtagataaggctggcacctgggccccccgggagctggtgctggtggtccaggtgcataaccggcccgaatacctcagactgctgctggactcacttcgaaaagcccagggaattgacaacgtcctcgtcatctttagccatgacttctggtcgaccgagatcaatcagctgatcgccggggtgaatttctgtccggttctgcaggtgttctttcctttcagcattcagttgtaccctaacgagtttccaggtagtgaccctagagattgtcccagagacctgccgaagaatgccgctttgaaattggggtgcatcaatgctgagtatcccgactccttcggccattatagagaggccaaattctcccagaccaaacatcactggtggtggaagctgcattttgtgtgggaaagagtgaaaattcttcgagattatgctggccttatacttttcctagaagaggatcactacttagccccagacttttaccatgtcttcaaaaagatgtggaaactgaagcagcaagagtgccctgaatgtgatgttctctccctggggacctatagtgccagtcgcagtttctatggcatggctgacaaggtagatgtgaaaacttggaaatccacagagcacaatatgggtctagccttgacccggaatgcctatcagaagctgatcgagtgcacagacactttctgtacttatgatgattataactgggactggactcttcaatacttgactgtatcttgtcttccaaaattctggaaagtgctggttcctcaaattcctaggatctttcatgctggagactgtggtatgcatcacaagaaaacctgtagaccatccactcagagtgcccaaattgagtcactcttaaataataacaaacaatacatgtttccagaaactctaactatcagtgaaaagtttactgtggtagccatttccccacctagaaaaaatggagggtggggagatattagggaccatgaactctgtaaaagttatagaagactgcagtgaaaatcacagttacaaaagcgacagtcttctatttttgatatttgtccaaacaggacatacaattgaataaaagagtttaggaactggtttctgctttaatacaaaaacaaaatcttgtaaaaggtgtccaaatacatagtaatcttttccagttatgtctgattaagatttaaaactgaaggtttcattttgggagtagggttttaaagctcaatctgttatctgctaaaattgattattgttgatatgagagaagaggggaaattttatttaaattgcatttattaatctttttatctgaaactttgtacacttttccactttcaaaacctattttaagtacagcaaaatttatttaaaactgtcatagcagtaaaaagtattacgatgaaattgttagggtattaatggaacaaacccagtttcactctcttgacacacttattaggaagggattgcttcactggtttaataatttaaaagttatgtttgttaaacaccctgtcagaacagtcattttcagtattagattcctgtactattgtgttttgagtgtgttttggaaccttcatagaacacactttcttttggaatgtatttgattgataagaaagtttaaacattgttttcacctcaatgtagaaatacagtggttttgtttttttttttcttttagtgctgacaaaataaaatactcatttttgcataaaaaggttcctaatccttttgcagaataagttttgtttactctttataccaaaattcagtgaaggcattctacaagttttgagttagcattacattttaatatttactattgctacattgtataattgagtttgaaataaaacccagcttatgacaatgcaaaaaaaaaaaaaaaaaa

SEQ ID NO: 93 - DNA, 1488 bp, homo sapiens
accactgtggttctactatgccttctgaccccgtcttggacttcaactgggagaatgtggagccatttgaacaggctcctcttctggagcatattttcttctgtcacttgtagaaaagctgtattggattgtgaggcaatgaaaacaaatgaattcccttctccatgtttggactcaaagactaaggtggttatgaagggtcaaaatgtatctatgttttgttcccataagaacaaatcactgcagatcacctattcattgtttcgacgtaagacacacctgggaacccaggatggaaaaggtgaacctgcgatttttaacctaagcatcacagaagcccatgaatcaggcccctacaaatgcaaagcccaagttaccagctgttcaaaatacagtcgtgacttcagcttcacgattgtcgacccggtgacttccccagtgctgaacattatggtcattcaaacagaaacagaccgacatataacattacattgcctctcagtcaatggctcgctgcccatcaattacactttctttgaaaaccatgttgccatatcaccagctatttccaagtatgacagggagcctgctgaatttaacttaaccaagaagaatcctggagaagaggaagagtataggtgtgaagctaaaaacagattgcctaactatgcaacatacagtcaccctgtcaccatgccctcaacaggcggagacagctgtcctttctgtctgaagctactacttccagggttattactgttgctggtggtgataatcctaattctggctttttgggtactgcccaaatacaaaacaagaaaagctatgagaaataatgtgcccagggaccgtggagacacagccatggaagttggaatctatgcaaatatccttgaaaaacaagcaaaggaggaatctgtgccagaagtgggatccaggccgtgtgtttccacagcccaagatgaggccaaacactcccaggagctacagtatgccacccccgtgttccaggaggtggcaccaagagagcaagaagcctgtgattcttataaatctggatatgtctattctgaactcaacttctgaaatttacagaaacaaactacatctcaggatggagtctcactctgttgcccaggctggagttcagtagcgcgatcttggctcacttcaatctccatcttcccagttcaagcgattctcatgcctcgacctcccgagtagctgggattacaggtgcccgctaccacgcccagctaatttttgtatttttagtagagatggggtttcactatggtggccaggctggtcttgaactcctgacctcagatgatctgcctgcctcggcctcccaaagtgctggaactacaagcctgagccaccgtgcccggccctgaatcgctttagtaaataaagggtctccaagaataaattcatccgaacatgcaaaaaaaaaaaaaaaaaaaaaaaaaaaaaaaaaaaaaaaaa

SEQ ID NO: 94 - DNA, 68 bp, homo sapiens
gaggcaaagttctgagacactccgactctgagtatgatagaagtcagtgcactacagaactttgtctc

SEQ ID NO: 95 - DNA, 110 bp, homo sapiens
gtgataatgtagcgagattttctgttgtgcttgatctaaccatgtggttgcgaggtatgagtaaaacatggttccgtcaagcaccatggaacgtcacgcagctttctaca

SEQ ID NO: 96 - DNA, 84 bp, homo sapiens
gtgctcggtttgtaggcagtgtcattagctgattgtactgtggtggttacaatcactaactccactgccatcaaaacaaggcac

SEQ ID NO: 97 - DNA, 81 bp, homo sapiens
gatactcgaaggagaggttgtccgtgttgtcttctctttatttatgatgaaacatacacgggaaacctcttttttagtatc

SEQ ID NO: 98 - DNA, 85 bp, homo sapiens
tctcatgatgtgaccatctggaggtaagaagcactttgtgttttgtgaaagaaagtgcttcctttcagagggttactctttgaga

SEQ ID NO: 99 - DNA, 1647 bp, homo sapiens
gcttcagctgaagaaagagaggaatgaagcgccttctgcttctgtttttgttctttataacattttcttctgcatttcccttagtccggatgacggaaaatgaagaaaatatgcaactggctcaggcatatctcaaccagttctactctcttgaaatagaagggaatcatcttgttcaaagcaagaataggagtctcatagatgacaaaattcgggaaatgcaagcattttttggattgacagtgactggaaaactggactcaaacacccttgagatcatgaagacacccaggtgtggggtgcctgatgtgggccagtatggctacaccctccctgggtggagaaaatacaacctcacctacagaataataaactatactccggatatggcacgagctgctgtggatgaggctatccaagaaggtttagaagtgtggagcaaagtcactccactaaaattcaccaagatttcaaaggggattgcagacatcatgattgcctttaggactcgagtccatggtcggtgtcctcgctattttgatggtcccttgggagtgcttggccatgcctttcctcctggtccgggtctgggtggtgacactcattttgatgaggatgaaaactggaccaaggatggagcaggattcaacttgtttcttgtggctgctcatgaatttggtcatgcactggggctctctcactccaatgatcaaacagccttgatgttcccaaattatgtctccctggatcccagaaaatacccactttctcaggatgatatcaatggaatccagtccatctatggaggtctgcctaaggaacctgctaagccaaaggaacccactataccccatgcctgtgaccctgacttgacttttgacgctatcacaactttccgcagagaagtaatgttctttaaaggcaggcacctatggaggatctattatgatatcacggatgttgagtttgaattaattgcttcattctggccatctctgccagctgatctgcaagctgcatacgagaaccccagagataagattctggtttttaaagatgaaaacttctggatgatcagaggatatgctgtcttgccagattatcccaaatccatccatacattaggttttccaggacgtgtgaagaaaatagatgcagccgtctgtgataagaccacaagaaaaacctacttctttgtgggcatttggtgctggaggtttgatgaaatgacccaaaccatggacaaagggttcccgcagagagtggtaaaacactttcctggaatcagtatccgtgttgatgctgctttccagtacaaaggattcttctttttcagccgtggatcaaagcaatttgaatacgacattaagacaaagaatattacccgaatcatgagaactaatacttggtttcaatgcaaagaaccaaagaactcctcatttggttttgatatcaacaaggaaaaagcacattcaggaggcataaagatattgtatcataagagtttaagcttgtttatttttggtattgttcatttgctgaaaaacacttctatttatcaataaattcatagacctaaaataaacctcaacaggtcttttaatataaattctgcttcaaaatagaataaaaccattctttaacaac

SEQ ID NO: 100 - DNA, 2067 bp, homo sapiens
agctccgtccgcgccctcccggcgcaccgcctgcggggcggtgactggcccagccgcaccgcgtctcccgccttctccgcagccccgcaggccccgggccctgtcattcccagcgctgccctgtcttgcgttccagtgttccagcttctgcgagatgaccctcaaggcgagcgagggcgagagtgggggcagcatgcacacggcgctctccgacctctacctggagcatttgctgcagaagcgtagtcggccagaggctgtatcgcatccattgaatactgtgaccgaggacatgtacaccaacgggtctcctgccccaggtagccctgcccaggtcaagggacaggaggtgcggaaagtgcgactcatacagtttgagaaggtcacagaagagcccatgggaatcacgctgaagctgaatgaaaaacagtcctgtacggtggccagaattcttcatggtggcatgatccatagacaaggctcccttcacgtgggggatgagatcctagaaatcaatggcacaaatgtgacaaatcattcagtggatcagctgcagaaggcgatgaaagaaaccaaaggaatgatctcattaaaagtaattcccaaccagcaaagccgtcttcctgcactacagatgttcatgagagcgcagtttgactatgatcccaaaaaggacaatctgatcccttgcaaggaggcgggactgaagtttgctactggggacattatccagattatcaacaaggatgacagcaattggtggcagggacgggtggaaggctcctccaaggagtcagcaggattgatcccttcccctgagctgcaggaatggcgagtggcaagtatggctcagtcagctcctagcgaagccccgagctgcagtccctttgggaagaagaagaagtacaaagacaaatatctggccaagcacagctcgatttttgatcagttggatgttgtttcctacgaggaagtcgttcggctccctgcattcaagaggaagaccctggtgctgatcggagccagtggggtgggtcgcagccacattaagaatgccctgctcagccagaatccggagaagtttgtgtaccctgtcccatatacaacacggccgccaaggaagagtgaggaagatgggaaggagtaccactttatctcaacggaggagatgacgaggaacatctctgccaatgagttcttggagtttggcagctaccaaggcaacatgtttggcaccaaatttgaaacagtgcaccagatccataagcagaacaagattgccatccttgacattgagccccagaccctgaaaattgttcggacagcagaactttcgcctttcattgtgttcattgcacctactgaccagggcactcagacagaagccctgcagcagctgcagaaggactctgaggccatccgcagccagtacgctcactactttgacctctcactggtcaataatggtgttgatgaaacccttaagaaattacaagaagccttcgaccaagcgtgcagttctccacagtgggtgcctgtctcctgggtttactaagcttgtagaatgggggaacccactgtatgcccctctccagcatttggaattccacccgccttgctttaagacaaacagggctgctccaactagttttgtgtcagcttccagctctctgcagctatcctaattcagccagtaaggttcagtcttcttgctcaggctcctgaagggttgattctcctgatagatggggccccactgatctggatttgaaaaggatttctagaaattgggggtaagaagtactaccaaaatgtaactgctaatcaagggtgatgcacagcaaaagcaatggaccccatccctctaaagcctgccctcctttgccttcaactgtatatgctgggtatttcatttgtctttttattttggagaaagcgtttttaactgcaactttctataatgccaaaatgacacatctgtgcaatagaatgatgtctgctctagggaaaccttcaaaagcaataaaaatgctgtgttgaaatgccaaaaaaaaaaaaaaaaaaaaa

SEQ ID NO: 101 - DNA, 4554 bp, homo sapiens
ctctttctagggactttcctgagtgggagggatttcgccggaacaaaaatgcctcagtttggaggtcgcgctcactgcgacggcaggctttgagtgtagcacttggtagttcttcctctgctctgcttcccttcggaggaaaatttcaggctgaaggtttagcgggtgccgcctctaaagagagcaatcactacacttatggctgggattttgcgcttagtagttcaatggcccccaggcagactacagactgtgacaaaaggtgtggagtctcttatttgtacagattggattcgtcacaaattcaccagatcaagaattccagaaaaagtgtttcaggcctcacctgaagatcatgaaaaatacggtggggatccacagaaccctcataaactgcatattgttaccagaataaaaagtacaagaagacgtccatattgggaaaaagatataataaagatgcttggattagaaaaagcacatacccctcaagttcacaagaatatcccttcagtgaatgcaaaattgaaagtagttaagcatttgataagaatcaagcccttgaagttgccacaaggacttccagcagaggagaacatgtctaacacgtgcctcaaaagcactggggagttagtagtgcagtggcatctgaaacctgtggagcagaaagcacatgagtcctaatgccccagcagcttccgattggaaaatgcaaattgtttttatttaaagatggtgagaaagtgttttcattaaaatatgttttcaaaaccattttcaggccgggcacggtggctcacctgtaatcccagcactttgggaggccaaggcgggcagatcacctgaggtcaagagttcgagaccagcctgaccaacatggagaaacccccatctctactgaaaatacagaattagccaggcatggtggcacatgcctgtaacccagctactcgggaggctgaagcaggagaatcacttgaacccgggaggcagaggttgcagtgagctgagatggtgccactgtactccagcctgggtgataggatgagactccatctcaggggaaaaaaaaaaatttttttttcactgactaaacctgctgcagctctcttttactacagacttggagattttagtttaatttggtttaattctctgtcctttccctttcactgtttcactccaaaacatgtaagaatggcaatgtttgaacatctgcgtttgggtctactgccaccttagcaagcctcattaaccattttataaaaattgcgttagtattgttgttgttgtttttgagacagggtcttgctctgtcacccaagctggaatacagtggcatgatttcagttcactgcagcctcgacctcccaggctcaagtgatcctcccacctcagcctccagagtagctaggactacaggcagtgtgccaccacatccagctaattttttaaagttttttcatagagacagggactcactatgttgtccaagctggtctcaaactcctgggttcaagccatcctcccacctcagcctcccaaaatgctgggattacaggcatgagccactgtacccagccaaaattgttttcttttttaagtgaattcaacaatttctgtgagtggctctttgcatgaacactgtgcaaggtgttggagaaatccaaagctgaccaaaacatggtccccaccttttggagcttacagtctgttctggggaacagagattcagccaaagtcaagaaacactggatgccagctagattatctgttctgtgctttggtgtctataagtacatatgtggatatgggttcattttatccctaaacttagtaccaaaccagcatttaatatctaattataaatctaatttggcctaaactttattattgcacactgcctgaacaaaacctatttgtctctatgtaaattttttcctcatggaacaagggtgtgaaatgaaaatattttaggatttattcaaaaacagactattctgttttcagcttcagaattgttctttgaatcctaaggaacctctgtcaacagttgaggttgctgttgaaaagaaagaagaaggaggcggaaatctctcagggagaattatttcctttcttttctattttagatacctggaggggtggggagaagtaagaattgtaagggaggttcagtagtggggaattctgtgacagctgattgaagatgatgatgaagaacctctgcattctagttaccctttgcttcccttcacctcttgtaaaatttggcttggcaacaatgacattgtcatgcttattgtcccaatatccatcctgtcgtagatcttaatgtttttgatcgttgcgttaaagtggaagtgccacccacagtgaaaccagatcccattaataaataagcttaaaggcaactgcagttttaattccatagttattgaatatccagtgtgtgtaaggcctggaggggagccaaaggacactaacttctaagagctccgtctagttggagagaaacctgtgtgccacaacatacagtgtccttgcttatgtggggtcgaagacatctgtgaaaataaaagcagcctctgctaatttagcgccatctcttttactgtgctaatttttttttctttagagacagggtctcactctgtcgcccagcctggagggcagtggtgtgatcgtagctcactattacctccaactcttgggctcaagtgatcctcccacctcagcctcctgagcagctaggactacagatacatgccaccgctcccggctagtattttttaaaattttttgtagagccaagtgttgctatgttgtccacactgatctggagcttctaatctcaaatgattctcctgcctcagcctcccaaagtgctgggaatacaggtgtgagccaccatacctggccttactgtactaatattaatattgtgtaaataggggaaaataccatggttaatttttactcaaacagtaagaaagtttgagtaactaattttaatctcaacagcccatagctagaagaggggatctaaatgttaagttgaatatttagaaataaaagtgtctacaagaagaaaagtctttagtgaaaatatgggcataggccagcagcattagctttctattgctgcagaacaaattaccacaaacttagctgcttaaaacaacacacacttattgtctcacaatgtttgtgggtcggaagtctaggcgtggcttagctgggtagtctgtttaggatctcagtgctggaaaaacgtgtctggccaggtgctcattgtagctttgacagggaagggatctgctcccaagcactctcaggttgttggcagaatttgtttccttatggctgtaggattcatggcaagttgcttcttccaaaaccagcattggagacagactagcaagatgggcactacactcttagataatcaaataaatgcaatcatgtgcctcgtgtcaccttttttgcattccattcattaagaacaagttgcagttcctacctacactcaaggaagggaggaattacacagaagtgtgaccacaggaggcagggctcatggaggcctccttaaagtcccccagccaaacctgaaaagtcaatcctggaccttatcatagtggctgtatagtttagaaggtttcttcagattggcattcctttgcctcatatcatcacttcaaaaccctataagggtttgttcctcggtcttgactttgtgtctttgaggattgctttgtttagtgtcacctgccttctttcaggaggttttgcctgacatctggtggtgaccgtggccaccaagtcaacccaaacactacctttaaggacgactgcagttctcttagggtctcctcaatctaaaattgtacctctttcaggccaaacacctattttcttcattttttttttctcataagaatgctagctagtatgcctattatctaactggcacagtttcaccaaggacagtttggaactacacaggccattttagggagattttgacatgaacaagattgcttctttgggaggtaccttaaaatgaaaagcaaagaaacttccatgcggagattgtcttgtttttctcaaaatgggataattttgcttaacataagtagtatcccttccttcctttccatactttgagaattaataaggactagctttttgatcacacagcttgataaaattttcaagggtccaaattactgtctaaaccatttgccactctttgtgtatatttgtcaaaatctgcttttctatatcaaaacttttctctcaagacctgagggaattaattaataaggaatccttggaacactggaaattctaaaataagagtcagatacaaaacactggtcactaaaattcttacctttatgtattagaatggcaatcaatgaacaaactgaaaatgtctttggatattatttctgtttattttttgcctcaaaattattaaatgacatgaaataagtgctcaagaagaaaaataaacaattcttcatttccaaaaaaaaaaaaaaaaaa

SEQ ID NO: 102 - DNA, 1905 bp, homo sapiens
cagccggagccgcggtgtacaacggaacttgtagtctcctcgtggctagttcaggcggaaggagcagtcctctgaagcttgaggagcctctagaactatgagcccgaggccttcccctctcccagagcgcagaggctttgaaggctacctctgggaagccgctcaccgtcggaagctgcgggagctgaaactgcgccatcgtcactgtcggcggccatgacaccgctcgtctcccgcctgagtcgtctgtgggccatcatgaggaagccacgagcagccgtgggaagtggtcacaggaagcaggcagccagccaggaagggaggcagaagcatgctaagaacaacagtcaggccaagccttctgcctgtgatggcctggccaggcagccggaagaggtggtattgcaggcctctgtctcctcataccatctattcagagacgtagctgaagtcacagccttccgagggagcctgctaagctggtacgaccaagagaaacgggacctaccatggagaagacgggcagaagatgagatggacctggacaggcgggcatatgctgtgtgggtctcagaggtcatgctgcagcagacccaggttgccactgtgatcaactactataccggatggatgcagaagtggcctacactgcaggacctggccagtgcttccctggaggaggtgaatcaactctgggctggcctgggctactattctcgtggccggcggctgcaggagggagctcggaaggtggtagaggagctagggggccacatgccacgtacagcagagaccctgcagcagctcctgcctggcgtggggcgctacacagctggggccattgcctctatcgcctttggccaggcaaccggtgtggtggatggcaacgtagcacgggtgctgtgccgtgtccgagccattggtgctgatcccagcagcacccttgtttcccagcagctctggggtctagcccagcagctggtggacccagcccggccaggagatttcaaccaagcagccatggagctaggggccacagtgtgtaccccacagcgcccactgtgcagccagtgccctgtggagagcctgtgccgggcacgccagagagtggagcaggaacagctcttagcctcagggagcctgtcgggcagtcctgacgtggaggagtgtgctcccaacactggacagtgccacctgtgcctgcctccctcggagccctgggaccagaccctgggagtggtcaacttccccagaaaggccagccgcaagccccccagggaggagagctctgccacctgtgttctggaacagcctggggcccttggggcccaaattctgctggtgcagaggcccaactcaggtctgctggcaggactgtgggagttcccgtccgtgacctgggagccctcagagcagcttcagcgcaaggccctgctgcaggaactacagcgttgggctgggcccctcccagccacgcacctccggcaccttggggaggttgtccacaccttctctcacatcaagctgacatatcaagtatatgggctggccttggaagggcagaccccagtgaccaccgtaccaccaggtgctcgctggctgacgcaggaggaatttcacaccgcagctgtttccaccgccatgaaaaaggttttccgtgtgtatcagggccaacagccagggacctgtatgggttccaaaaggtcccaggtgtcctctccgtgcagtcggaaaaagccccgcatgggccagcaagtcctggataatttctttcggtctcacatctccactgatgcacacagcctcaacagtgcagcccagtgacacctctgaaagcccccattccctgagaatcctgttgttagtaaagtgcttatttttgtagttaaaaaaaaaaaaaaaaaa

SEQ ID NO: 103 - DNA, 6038 bp, homo sapiens
atttccaccaagaacccagagagtggaacacttctgaacctgcatttttatctggaactccagaggcagaatcctttgctaaataaatcgcagccatgagtgcgagctcagacgctgagatggctgtttttggcgaagctgctccctaccttcgaaaatcagaaaaggagcggattgaggcccaaaacaagccgtttgatgctaaaacatctgtctttgtggcggagcccaaggaatcctatgtgaagagcactatacaaagcaaagaaggagggaaagtaaccgtaaagactgaaggtggagcaactctaactgtcagggaagaccaagtcttccctatgaaccctccgaaatatgacaaaattgaggacatggccatgatgactcatctacacgagcctggagtgctgtacaacctcaaagagcgctatgcagcctggatgatctacacctactcaggcctcttctgtgtcaccgtcaacccctacaagtggctgccggtgtacaagcccgaggtggtggctgcctacagaggcaaaaagcgccaggaggccccgccccacatcttctccatctctgacaatgcctatcagttcatgttgactgatcgagagaatcagtccatcctgatcaccggagaatctggtgccggaaagactgtgaacaccaagcgtgtcatccaatactttgcaacaattgcagttactggagagaagaagaaggatgaatctggcaaaatgcaggggactctggaagatcaaatcatcagcgccaatcccctactggaggcctttggcaatgccaaaactgtgaggaatgacaactcctctcgctttggtaaattcattagaatccactttggtactacagggaagctggcatctgctgatatagaaacatatcttttagaaaagtccagagttactttccagctaaaggcggaaagaagctaccatattttttatcagatcacttccaataagaagccagatctaattgaaatgctcctgatcaccaccaacccatatgactatgccttcgtcagtcagggggagatcacagttcccagtattgatgaccaagaagagttgatggccactgatagtgccattgacatcctgggcttcactcctgaagagaaagtgtccatctataaactcacaggggctgtgatgcattatgggaacatgaaattcaagcaaaagcagcgtgaggagcaagctgagccagatggcacagaagtcgctgacaaggcagcctatctccagagtctgaactctgcagacctactcaaagccctctgctaccctagggtcaaggttggcaatgagtatgtcaccaaaggccagactgtgcagcaggtgtacaatgcggtgggtgctctggccaaagccgtctacgagaagatgttcctgtggatggtcacccgcatcaaccagcagctggacaccaagcagcccaggcagtacttcatcggggtcttggacattgctggctttgaaatctttgattttaacagcctggagcagctgtgcatcaacttcaccaacgagaaactgcaacagtttttcaaccaccacatgtttgtgctagagcaggaggagtacaagaaggaaggcatcgagtggacgttcattgactttgggatggacctggctgcctgcattgagctcattgagaagccactgggcatcttctccatcctggaagaggagtgcatgttccctaaggcaacggacacctccttcaagaacaagctgtatgaccagcacctgggcaagtctgccaacttccagaagcccaaggtggtcaaaggcaaggctgaggcccacttctctctgattcactatgctggcactgtggactacaacattactggctggctggacaaaaataaggaccccctgaatgatactgtggttgggctgtaccagaagtctgcaatgaagactctagccagtctcttttccacgtatgctagtgctgaagcagatagcagcgcgaagaaaggtgctaagaaaaagggctcttctttccagactgtgtctgcccttttcagggaaaatttaaataaattgatgacgaatctgaggagcacacaccctcacttcgtacggtgtatcattcccaatgaaaccaaaactcctggggcaatggaacatgaacttgtgttgcaccagctgaggtgtaatggtgtgctggaaggcatccgcatctgtaggaaaggattcccaagcagaatcttatatggtgatttcaaacaaagatacaaggttttaaatgcaagtgctattccagagggacagttcattgacagcaagaaggcttctgagaaacttcttgcatctattgatattgatcatactcaatataaatttggacataccaaggttttcttcaaagctggacttctgggtcttctggaagaaatgagagatgaaaaattagcccaaattataacaagaacacaagctgtctgtaggggattcctaatgagggtagaatatcagaagatgttgcaaaggagagaagcacttttctgcatccagtataatgtccgtgccttcatgaacgtcaagcactggccctggatgaaactctttttcaagattaagcccctcctcaagagtgcagagaccgagaaagagatggccaccatgaaggaagaattccagaaaaccaaagatgaactcgccaagtcagaggcaaaacggaaggagctagaggaaaaaatggtcactctcttaaaagagaaaaatgacctgcaactccaggttcaatctgaagcagatagcttggctgatgcagaggaaaggtgtgagcaactgattaaaaacaaaatccaacttgaggccaaaatcaaagaggtgactgaaagagctgaggaggaggaagagatcaatgctgagctgacagccaagaagagaaaactggaggatgaatgttcagaactcaagaaagacattgatgaccttgagctgacactggccaaggttgagaaggagaaacatgccacggagaacaaggtgaaaaatcttacagaagagatggcaggcctggatgaaaccattgcaaaactgtccaaggagaagaaggctctccaagagacccaccagcagaccctggatgacctgcaggcagaggaggacaaagtcaacatcctgaccaaagctaaaaccaagctagaacagcaagtggatgatcttgaagggtctctggaacaagaaaagaagcttcgaatggatctagaaagagcaaagcggaaactggagggtgacctcaaattggcccaagaatccacaatggatatggaaaatgacaaacagcaacttgatgaaaagcttgaaaagaaagaatttgaaatcagcaatttgataagcaaaattgaagatgagcaagctgtagaaattcaactacagaagaagatcaaagagttgcaggcccgcattgaggagctgggggaagaaatcgaggcagagagggcgtcccgagccaaagcggagaagcagcgctctgacctctcccgggaactggaggagatcagcgagaggctggaagaagccggtggggcaacttctgctcaggtggaattgaacaagaagcgggaggctgagtttcagaaactgcgcagggacctggaggaggccaccctgcagcatgaagctatggtggctgctcttcggaagaagcacgcagacagtatggctgagcttggggagcagattgacaacttgcagcgggtcaaacagaagctggagaaggagaagagtgagctgaagatggagactgatgacctcagcagtaacgcagaggccatttccaaagccaagggaaaccttgaaaagatgtgccgctctctagaagatcaagtgagtgagcttaagaccaaggaagaggagcagcagcggctgatcaatgacctcacagcacagagagcgcgcctgcagacagaagcgggtgaatattctcgacaattagatgagaaagatgctttagtctctcagctttcaaggagcaagcaagcatctactcagcagattgaagagctgaaacatcaactagaggaagaaactaaagccaagaacgccctggcacacgccctgcagtcctcccgccatgactgcgacctgctgcgggaacagtatgaggaagagcaggaaggcaaagctgagctgcagagggcgctgtccaaggccaacagtgaggttgcccagtggagaaccaaatacgagacggatgccatccagcgcacagaggagctggaggaggccaagaaaaagttggcccagcgcctgcaagaagctgaggaacatgtagaagctgtgaacgccaaatgtgcttcccttgagaagacgaagcagcggctccagaatgaagttgaagacctcatgcttgatgtggaaaggtctaatgcagcctgtgcagcccttgataagaagcaaaggaactttgacaaggtcctatcagaatggaagcagaagtatgaggaaactcaggctgaacttgaggcctcccagaaggagtcacgttctcttagcactgagctgttcaaggtgaagaatgtctatgaggaatccctggatcaactcgaaacgctaagaagagaaaataagaacttgcaacaggagatttctgacctcactgagcagattgcagagggaggaaagcaaattcatgaattggagaaaataaagaagcaagtagaacaagagaaatgtgaaattcaggctgctttagaggaagcagaggcatctcttgaacatgaagaaggaaagattctgcgtatccagcttgagttaaaccaagtcaagtctgaagttgatagaaaaatcgcagaaaaggatgaggaaattgaccagctgaagagaaaccacactagagtcgtggagacaatgcagagcacgctggatgcagagattagaagcagaaatgatgctctgagagtcaagaagaaaatggaaggagatctgaatgaaatggaaatccagctgaaccatgccaatcgcttagctgcagagagtttaaggaactacaggaacacccaaggaatcctgaaggaaacccagctccacctggatgatgctctccggggccaggaggacctcaaggaacagctggcaattgtggagcgcagagccaacctgctgcaggctgagatcgaggagctgtgggccactctggaacagacagagagaagcaggaaaatcgccgaacaggagctcctggatgccagtgagcgtgtccagctcctccacacccagaataccagtctcattaacaccaagaagaaattagaaaatgacgtttcccaactccaaagtgaagtggaagaagtaatccaagaatcacgcaatgcagaagagaaagccaagaaggccatcactgatgctgccatgatggctgaggagctgaagaaggaacaggacaccagcgcccacctggagcggatgaagaagaacctggagcagacggtgaaggacctgcagcatcgtctagatgaggccgagcagctggcgctgaagggtgggaagaagcagatccagaaactggaggccagggtacgtgagcttgaaggagaggttgaaaatgaacagaaacgtaatgcagaggctgttaaaggtttacggaaacatgagcgacgagtaaaagaactcacctaccagactgaagaagatcgcaagaatgttctcaggctgcaggacttggtagataaattacaggcgaaggtgaaatcatacaagagacaagctgaggaggctgaggaacaatccaatgctaatctatctaaattccgcaaactccagcatgagctggaggaggccgaggaacgggctgacattgctgagtcccaggtcaacaaattgcgagtgaagagccgagaggttcacacaaaaatcagtgcagagtaaacacacctgcctgatgctatcaagaggctgaagaaaggcacaaaatgtgctatttttggtcacttgctttatgacgtttattttcctgttaaagctgaataaataaaaactacagtaaatgtatacatt

SEQ ID NO: 104 - DNA, 883 bp, homo sapiens
ggataatgcaagtgtttaacagatgcttcactattaaaatattttccccccaagtctcaaatattgaagaatctctaaccaggtacagtatcactctgctctcttttctggttgaaaagaaagaaagaaagaaaacgcaggtattgcttttcgaagtgctttgtaggtaatcgagggacaccagtccctacgaagaccttgggcgattttgaagtgcgggcacctcgattccccgaatctgtagtgtggctggtatcggtgttcccctggtttaactagcctgtttgaaggcacagatcattcatggggatgtataaccgaaaccagtcctctccaccgcctggggatcttcactttcgcagtctacgactgcctgtgactccagaaagacaaactgcagattggccaagtgcctttcaaactgttttttactggatgaagaaactcaaccaagaaaatatatgtcgattcttgtatatgggacaatattagctgctgtgatttttaatactagcataaaatataagaatctttttattactgtgatattgttttttcctaaatgaatgcatagtgtaacaattggtgtcaaaaagcattgaatttttttcagatggattaagctggaataataaagtatatctatgagatgatttctgtaaactctgacttgctgagaaaaaagtgaaaaagctttttctggaagaaacatggcaacttaaccgttattaatctggactaaataaaacaggaaactgcttctttacatttctagtaattttttctgcttttccaaacattgttaagttctatgcaacttgtgctattcaagtaaagatgatgtcagtaataaaattacagaatctaaaaaaaaaaaaaaaaa

SEQ ID NO: 105 - DNA, 646 bp, homo sapiens
aatcgtcaatgcgacgtcctcctactcccacctcagagctgtcacagagactgtcagttccgtccctccccttcagccctttaacgcacgtcttcccgaccgcataacttgctcagtccctgcggccaactggggcgggccaatggctgtgacggataaggggtgtggggtgcggggacaatgggccagagcttctcatgcagcctgcaccagcgccgggtcggagagtcagaggccaccctgagatggaccgagatcttcagttggggaggcgcctccggtgagcttgcggccagatgccccctcagtagtcctccgcaacaggtgccgcgcagccgagtggcgggctagcataccgcctgcccgcaattcggccaggcctcgagcctgctccgccttcccgctgcggtagcgccgccggggaaacgccgccacgggctgcatgggcagcgctcgcgccccgccgctgagccgccggggagccgtccagtcttcgaatcccagcttggtggcatgcatgtttagtcccagctacacagcagggaggctgaggctgaaggaatacttgagcccaggaattcaagactagcctgcacaacatagtgagaccctgactttaaaataaatttaaaaaaattaaaagcaa

SEQ ID NO: 106 - DNA, 525 bp, homo sapiens
atgatgtatgctttgtttctgttgagtgtgggtttagtaatggggtttgtggggttttcttctaagccttctcctatttatgggggtttagtattgattgttagcggtgtggtcgggtgtgttattattctgaattttgggggaggttatatgggtttaatagtttttttaatttatttagggggaatgatggttgtctttggatatactacagcgatggctattgaggagtatcctgaggcatgggggtcaggggttgaggtcttggtgagtgttttagtggggttagcgatggaggtaggattggtgctgtgggtgaaagagtatgatggggtggtggttgtggtaaactttaatagtgtaggaagctgaataatttatgaaggagaggggtcagggttgattcgggaggatcctattggtgcgggggctttgtatgattatgggcgttgattagtagtagttactggttgaacattgtttgttggtgtatatattgtaattgagattgctcgggggaatagg

SEQ ID NO: 107 - DNA, 3271 bp, homo sapiens
gctgtgacagccacacgccccaaggcctccaagatgagctacacgttggactcgctgggcaacccgtccgcctaccggcgggtaaccgagacccgctcgagcttcagccgcgtcagcggctccccgtccagtggcttccgctcgcagtcgtggtcccgcggctcgcccagcaccgtgtcctcctcctataagcgcagcatgctcgccccgcgcctcgcttacagctcggccatgctcagctccgccgagagcagccttgacttcagccagtcctcgtccctgctcaacggcggctccggacccggcggcgactacaagctgtcccgctccaacgagaaggagcagctgcaggggctgaacgaccgctttgccggctacatagagaaggtgcactacctggagcagcagaataaggagattgaggcggagatccaggcgctgcggcagaagcaggcctcgcacgcccagctgggcgacgcgtacgaccaggagatccgcgagctgcgcgccaccctggagatggtgaaccacgagaaggctcaggtgcagctggactcggaccacctggaggaagacatccaccggctcaaggagcgctttgaggaggaggcgcggttgcgcgacgacactgaggcggccatccgcgcgctgcgcaaagacatcgaggaggcgtcgctggtcaaggtggagctggacaagaaggtgcagtcgctgcaggatgaggtggccttcctgcggagcaaccacgaggaggaggtggccgaccttctggcccagatccaggcatcgcacatcacggtggagcgcaaagactacctgaagacagacatctcgacggcgctgaaggaaatccgctcccagctcgaaagccactcagaccagaatatgcaccaggccgaagagtggttcaaatgccgctacgccaagctcaccgaggcggccgagcagaacaaggaggccatccgctccgccaaggaagagatcgccgagtaccggcgccagctgcagtccaagagcatcgagctagagtcggtgcgcggcaccaaggagtccctggagcggcagctcagcgacatcgaggagcgccacaaccacgacctcagcagctaccaggacaccatccagcagctggaaaatgagcttcggggcacaaagtgggaaatggctcgtcatttgcgcgaataccaggacctcctcaacgtcaagatggctctggatatagaaatcgctgcgtacagaaaactcctggagggtgaagagactagatttagcacatttgcaggaagcatcactgggccactgtatacacaccgacccccaatcacaatatccagtaagattcagaaacccaaggtggaagctcccaagcttaaggtccaacacaaatttgtcgaggagatcatagaggaaaccaaagtggaggatgagaagtcagaaatggaagaggccctgacagccattacagaggaattggccgtttccatgaaggaagagaagaaagaagcagcagaagaaaaggaagaggaacccgaagctgaagaagaagaagtagctgccaaaaagtctccagtgaaagcaactgcacctgaagttaaagaagaggaaggggaaaaggaggaagaagaaggccaggaagaagaggaggaagaagatgagggagctaagtcagaccaagccgaagagggaggatccgagaaggaaggctctagtgaaaaagaggaaggtgagcaggaagaaggagaaacagaagctgaagctgaaggagaggaagccgaagctaaagaggaaaagaaagtggaggaaaagagtgaggaagtggctaccaaggaggagctggtggcagatgccaaggtggaaaagccagaaaaagccaagtctcctgtgccaaaatcaccagtggaagagaaaggcaagtctcctgtgcccaagtcaccagtggaagagaaaggcaagtctcctgtgcccaagtcaccagtggaagagaaaggcaagtctcctgtgccgaaatcaccagtggaagagaaaggcaagtctcctgtgtcaaaatcaccagtggaagagaaagccaaatctcctgtgccaaaatcaccagtggaagaggcaaagtcaaaagcagaagtggggaaaggtgaacagaaagaggaagaagaaaaggaagtcaaggaagctcccaaggaagagaaggtagagaaaaaggaagagaaaccaaaggatgtgccagagaagaagaaagctgagtcccctgtaaaggaggaagctgtggcagaggtggtcaccatcaccaaatcggtaaaggtgcacttggagaaagagaccaaagaagaggggaagccactgcagcaggagaaagagaaggagaaagcgggaggagagggaggaagtgaggaggaagggagtgataaaggtgccaagggatccaggaaggaagacatagctgtcaatggggaggtagaaggaaaagaggaggtagagcaggagaccaaggaaaaaggcagtgggagggaagaggagaaaggcgttgtcaccaatggcctagacttgagcccagcagatgaaaagaaggggggtgataaaagtgaggagaaagtggtggtgaccaaaacggtagaaaaaatcaccagtgaggggggagatggtgctaccaaatacatcactaaatctgtaaccgtcactcaaaaggttgaagagcatgaagagacctttgaggagaaactagtgtctactaaaaaggtagaaaaagtcacttcacacgccatagtaaaggaagtcacccagagtgactaagatttgagtccattgcaaaaggttaagccatatgacaatttcaaaatgcatgtgattggcagcttcaaaacagaacgggttctcccatgggggctccagacattgtattttactttgtgcaatatgaggggactgcatgcaagctcagggtgctccctcctcagtctttgggggattcaaatgcatgatattgtatgtacctgggaaatttgccgatttcctaagctgttggaagggggtcacttaaggggggatgtcttgagatgtattatgcaaagtaccaactgagccaaaaacaataaacgaaacacagaactcagccttaagaaagctatatatgaataattatgtttacctcactggtgcatttaaaatggacttttgttcatgggagaacctcgttgacatgcacagtttgcaatcttatgttgatcgatgttaaacgtcacagcagtacttgctcaataaaggtcatattggaaacata

SEQ ID NO: 108 - DNA, 3002 bp, homo sapiens
ggggaggaggggagaacggggagcgcacagcctggacgcgtgcgcaggcgtcaggcgcatagacctgctagcccctcagctagcggccccgcccgcgcttagcatcactaactgggctatataacctgagcgcccgcgcggccacgacacgaggaattcgcccacgcaggaggcgcggcgtccggaggccccagggttatgagactatcactgctcaggacctactaacaacaaaggaaatcgaaacatgaccaaatcgtacagcgagagtgggctgatgggcgagcctcagccccaaggtcctccaagctggacagacgagtgtctcagttctcaggacgaggagcacgaggcagacaagaaggaggacgacctcgaagccatgaacgcagaggaggactcactgaggaacgggggagaggaggaggacgaagatgaggacctggaagaggaggaagaagaggaagaggaggatgacgatcaaaagcccaagagacgcggccccaaaaagaagaagatgactaaggctcgcctggagcgttttaaattgagacgcatgaaggctaacgcccgggagcggaaccgcatgcacggactgaacgcggcgctagacaacctgcgcaaggtggtgccttgctattctaagacgcagaagctgtccaaaatcgagactctgcgcttggccaagaactacatctgggctctgtcggagatcctgcgctcaggcaaaagcccagacctggtctccttcgttcagacgctttgcaagggcttatcccaacccaccaccaacctggttgcgggctgcctgcaactcaatcctcggacttttctgcctgagcagaaccaggacatgcccccccacctgccgacggccagcgcttccttccctgtacacccctactcctaccagtcgcctgggctgcccagtccgccttacggtaccatggacagctcccatgtcttccacgttaagcctccgccgcacgcctacagcgcagcgctggagcccttctttgaaagccctctgactgattgcaccagcccttcctttgatggacccctcagcccgccgctcagcatcaatggcaacttctctttcaaacacgaaccgtccgccgagtttgagaaaaattatgcctttaccatgcactatcctgcagcgacactggcaggggcccaaagccacggatcaatcttctcaggcaccgctgcccctcgctgcgagatccccatagacaatattatgtccttcgatagccattcacatcatgagcgagtcatgagtgcccagctcaatgccatatttcatgattagaggcacgccagtttcaccatttccgggaaacgaacccactgtgcttacagtgactgtcgtgtttacaaaaggcagccctttgggtactactgctgcaaagtgcaaatactccaagcttcaagtgatatatgtatttattgtcattactgcctttggaagaaacaggggatcaaagttcctgttcaccttatgtattattttctatagctcttctatttaaaaaataaaaaaatacagtaaagtttaaaaaatacaccacgaatttggtgtggctgtattcagatcgtattaattatctgatcgggataacaaaatcacaagcaataattaggatctatgcaatttttaaactagtaatgggccaattaaaatatatataaatatatatttttcaaccagcattttactacttgttacctttcccatgctgaattattttgttgtgattttgtacagaatttttaatgactttttataatgtggatttcctattttaaaaccatgcagcttcatcaatttttatacatatcagaaaagtagaattatatctaatttatacaaaataatttaactaatttaaaccagcagaaaagtgcttagaaagttattgtgttgccttagcacttctttcctctccaattgtaaaaaaaaaaaaaaaaaaaaaaaaaaaaaaaaaattgcacaatttgagcaattcatttcactttaaagtctttccgtctccctaaaataaaaaccagaatcataattttcaagagaagaaaaaattaagagatacattccctatcaaaacatatcaattcaacacattacttgcacaagcttgtatatacatattataaataaatgccaacatacccttctttaaatcaaaagctgcttgactatcacatacaatttgcactgttactttttagtcttttactcctttgcattccatgattttacagagaatctgaagctattgatgtttccagaaaatataaatgcatgattttatacatagtcacaaaaatggtggtttgtcatatattcatgtaataaatctgagcctaaatctaatcaggttgttaatgttgggatttatatctatagtagtcaattagtacagtagcttaaataaattcaaaccatttaattcataattagaacaatagctattgcatgtaaaatgcagtccagaataagtgctgtttgagatgtgatgctggtaccactggaatcgatctgtactgtaattttgtttgtaatcctgtatattatggtgtaatgcacaatttagaaaacattcatccagttgcaataaaatagtattgaaagtgagagcaattgttgcatttcttcttaaagggattctgtttttatttttggggaaagtagttgcttttttgctgagttaaaaaatactaaacactatatgtagaataaaagaaaagaaaaaagtttaccttggcatatgctcttgtctgtttatcttgcacagggagtcaccagttctatgtagataatgaaaagacctaactgatatttcattatttggaatatgggactggacggcagtacaaacagtgtgtttttttctttgttttaagtggcttagcctttaggttttttatttccatttttaaaaatgattgttacatgttttcttctatttctttttttaaaaggtggattttaataa

SEQ ID NO: 109 - DNA, 3228 bp, homo sapiens
caggcgcagtgcaggactgctccgagcacgcctacgcgcgcattttctccccttcctctccctctttccactttcctctccctttttctcctctcctttccccctcccaccacttggtctttcagtctttcagtcagttcgtttaggtctctccttccgacccccacccccagctcctctccctttccttttccccctccccctttcctttcccgtctcacgcgccaggccgcttgcacatgcgcattaggtacaaagcctcgctctttgtccccatctgtcgttcacacgaactcaagcctttggcattcggcagccaatagaatctaagaaatggcggaaaaatgattccgcctcgggagctaaaccttgattggcagtttagctaaccaatcgagaacgccattttgtaccccttggcaggcaccgagctccgtcgtctcgtttccggcggtcgcgcgctcttttctcgggacgggagaggccgtgtagcgtcgccgttactccgaggagataccagtcggtagaggagaagtcgaggttagagggaactgggaggcactttgctgtctgcaatcgaagttgagaggcccagtatttaggcgacagtgaatttattactctgaagagggttctgcacatatttccaaattatattggtggtcatcagaagtaggtgataggaagaaatacttctcaagggtgcaaaaatgcagagtaataaaacttttaacttggagaagcaaaaccatactccaagaaagcatcatcaacatcaccaccagcagcagcaccaccagcagcaacagcagcagccgccaccaccgccaatacctgcaaatgggcaacaggccagcagccaaaatgaaggcttgactattgacctgaagaattttagaaaaccaggagagaagaccttcacccaacgaagccgtctttttgtgggaaatcttcctcccgacatcactgaggaagaaatgaggaaactatttgagaaatatggaaaggcaggcgaagtcttcattcataaggataaaggatttggctttatccgcttggaaacccgaaccctagcggagattgccaaagtggagctggacaatatgccactccgtggaaagcagctgcgtgtgcgctttgcctgccatagtgcatcccttacagttcgaaaccttcctcagtatgtgtccaacgaactgctggaagaagccttttctgtgtttggccaggtagagagggctgtagtcattgtggatgatcgaggaaggccctcaggaaaaggcattgttgagttctcagggaagccagctgctcggaaagctctggacagatgcagtgaaggctccttcctgctaaccacatttcctcgtcctgtgactgtggagcccatggaccagttagatgatgaagagggacttccagagaagctggttataaaaaaccagcaatttcacaaggaacgagagcagccacccagatttgcacagcctggctcctttgagtatgaatatgccatgcgctggaaggcactcattgagatggagaagcagcagcaggaccaagtggaccgcaacatcaaggaggctcgtgagaagctggagatggagatggaagctgcacgccatgagcaccaggtcatgctaatgagacaggatttgatgaggcgccaagaagaacttcggaggatggaagagctgcacaaccaagaggtgcaaaaacgaaagcaactggagctcaggcaggaggaagagcgcaggcgccgtgaagaagagatgcggcggcagcaagaagaaatgatgcggcgacagcaggaaggattcaagggaaccttccctgatgcgagagagcaggagattcggatgggtcagatggctatgggaggtgctatgggcataaacaacagaggtgccatgccccctgctcctgtgccagctggtaccccagctcctccaggacctgccactatgatgccggatggaactttgggattgaccccaccaacaactgaacgctttggtcaggctgctacaatggaaggaattggggcaattggtggaactcctcctgcattcaaccgtgcagctcctggagctgaatttgccccaaacaaacgtcgccgatactaataagttgcagtgtctagtttctcaaaacccttaaaagaaggaccctttttggactagccagaattctaccctggaaaagtgttagggattccttccaatagttagatctaccctgcctgtactactctagggagtatgctggaggcagagggcaagggaggggtggtattaaacaagtcaattctgtgtggtatattgtttaatcagttctgtgtggtgcattcctgaagtctctaatgtgactgttgagggcctggggaaaccatggcaaagtggatccagttagagcccattaatcttgatcattccggttttttttttttttgtccatcttgtttcatttgcttgccccgcccccgagacggagtcttactctgtcgcccaggctggagtgtagtggcatgatctcggctcactgcaatctctgcctcccgggttcaagcttgtccaggttgatcttgaactcctgacctcgtgatctacccacctcggcctcccaaaatgctgggattacaggggtgagccaccgtgcccaacctcacttgcttcttatccttacactcccccagccccagagaaactgccacatacaccacaaaaaccaaacatcccccaatgaccttagccccattgctccattcactcccaggtgagaattcaggcaaacgtccacaaaggtcacaggcagcgtacatacggttctgttataccccatatattaccccttcatgtcctaaagaagacattttctcttagagattttcattttagtgtatctttaaaaaaaaatcttgtgttaacttgcctccatctttttcttgggtgaggacacccaggaatgacccttttgtgtctatgatgttgctgttcacagcttttcttgataggcctagtacaatcttgggaacagggttactgtatactgaaggtctgacagtagctcttagactcgcctatcttaggtagtcatgctgtgcattttttttttcattggtgtactgtgtttgatttgtctcatatatttggagtttttctgaaaaatggagcagtaatgcagcatcaacctattaaaatacattttaagccttttaaaaaaaaaaaa

SEQ ID NO: 110 - DNA, 3197 bp, homo sapiens
ccctgggagcccgcacccgtctctggtgccagggcgttgtcgggggtcccaagagagcggggtggggaaggtgaagggagcgcggctggaaaaatggggattagggtggcggaacaggcacttgtcaggagtgaagagacagcggagagggtactgggctgaattctttcgtgccgagcaggtccctccggttcccaactcacccgggtggagcaggcgcgggccgaacccgggaggagagtgtcggggatccgcgaaggagcctcctggggatggggcgggggatggacaaagcgctgcccccggctggacgcgctctggctgcagcccggctggcatccggagctgggaacagcagcccgcggggtgcccgggtcagggctcaaccctagcgggtctctggcgaggccgggggcgcagcccgcggggcgccactcaggccgtccagctgccgcgcggtccagcgctgacccgagcccgggaggcagctgcgctctaaggtttgcgctcctgtttgcgaggtgtcttcatataacaaatgcgagcaataacaaacatccatagaactcgaattccagaaacgggaattcttttttccaagttcacagacctttagttaatcttttaaaggaactgaggcgttgtgttggaccaaagccaaaacgattttaccttagaccatggaaaatagcctaaggctctttcagcagaattttgcagtccgaatgcaattttagatttcagatttctcaagggaagagaaactctgctgttagaatttggaagggagggtggtgcatgcctgtgtgtttgtcagctgagcagagctgtatttatctttccaattcaaattgtgccagattctggctttaagaacaaaccatgggaatatttgagaacatggaatcatgctgctgttccacgatcacagcaaaacagacaatagttgatattgtatcattgcaggaggaaaaagaattacatatattttattcttttgtgtgattgtcatcctttgtgaaaagaatgatgtgtattttcataaagcaaaaaattattcaaacaaagaaaccttatttaaatgtacaagtcagacttttaatatcctttgaattccctgcagttcctcctattattcttgagaactatctactttcttaaaatacttaaaatctattcagaaggtttcatttgtctaggtgtcagatatagaagagtttataagaaaattccagtaaacctttaaaaagatattattttttataagttgccatagtttaataaagaacttttatttttcacactttttactcagagattaaagttctgtgtttcagcctggaaattctgatggtgggagatacaactaatacaaaagagaatgagtaaatatagtaattaggtctgctcattgtgtttttcaggaaaaaggaagggaaagggtgttacaaggaaaggctatcggtaacaactgacctgccacaaagttagaagaaaggattgattcaagaaagactataatatggatttagagctcgacgagtattataacaagacacttgccacagagaataatactgctgccactcggaattctgatttcccagtctgggatgactataaaagcagtgtagatgacttacagtattttctgattgggctctatacatttgtaagtcttcttggctttatggggaatctacttattttaatggctctcatgaaaaagcgtaatcagaagactacggtaaacttcctcataggcaatctggccttttctgatatcttggttgtgctgttttgctcacctttcacactgacgtctgtcttgctggatcagtggatgtttggcaaagtcatgtgccatattatgccttttcttcaatgtgtgtcagttttggtttcaactttaattttaatatcaattgccattgtcaggtatcatatgataaaacatcccatatctaataatttaacagcaaaccatggctactttctgatagctactgtctggacactaggttttgccatctgttctccccttccagtgtttcacagtcttgtggaacttcaagaaacatttggttcagcattgctgagcagcaggtatttatgtgttgagtcatggccatctgattcatacagaattgcctttactatctctttattgctagttcagtatattctgcccttagtttgtcttactgtaagtcatacaagtgtctgcagaagtataagctgtggattgtccaacaaagaaaacagacttgaagaaaatgagatgatcaacttaactcttcatccatccaaaaagagtgggcctcaggtgaaactctctggcagccataaatggagttattcattcatcaaaaaacacagaagaagatatagcaagaagacagcatgtgtgttacctgctccagaaagaccttctcaagagaaccactccagaatacttccagaaaactttggctctgtaagaagtcagctctcttcatccagtaagttcataccaggggtccccacttgctttgagataaaacctgaagaaaattcagatgttcatgaattgagagtaaaacgttctgttacaagaataaaaaagagatctcgaagtgttttctacagactgaccatactgatattagtatttgctgttagttggatgccactacaccttttccatgtggtaactgattttaatgacaatcttatttcaaataggcatttcaagttggtgtattgcatttgtcatttgttgggcatgatgtcctgttgtcttaatccaattctatatgggtttcttaataatgggattaaagctgatttagtgtcccttatacactgtcttcatatgtaataattctcactgtttaccaaggaaagaacaaatgctggggtcatataaaatatatttatgataactatttacatataataaatagaaattttgttaacatggaatttaatttatgtgaaagagttctggattcaaatgtcagttcataatatatggaagataattttatgtgttatagtaggattaatttatttagttgtgcagtcagtgtcaatccaatctgtaatttcactttagaaggttgtattaccttccacttccatgttgtcttataaacaaatgaattgtattttttgttgaaagtaaaagttatatctaaccaaaaaaaaaaaaaaaa

SEQ ID NO: 111 - DNA, 744 bp, homo sapiens
cagtgggcctgggaagatgtgtttcccctggatgtgcacattcctgtttgtggcttatcgcctctcatttattctgtgtgagtaggtagaaaatgagcatcacggacgtgctcagtgctgacgacattgcagcagcgctccaggaatgccgagacccagacacttttgaaccccaaaaattcttccagacatcaggcctctccaagatgtcagccaatcaggtgaaggatgttttccggttcatagacaacgaccagagcgggtacctggatgaagaagagcttaagtttttcctccagaagtttgagagtggtgccagagaactgaccgagtcagaaaccaagtccttgatggctgcggcggataatgatggagatgggaaaattggagcagaggaattccaggaaatggtgcattcttaaaagccccagtctctggagaaaagagagaaagggataatcacctggaaggattccaaagccctgggaatggggaaccccacatcccatccctacctaatttgttaattttccctgaaaaccttctgcagtttgctcattgttttagtgaggtcacgagggagtcactcctgactttcttggtggtgggtatatgccctgacaacttctgtaagccccccttcccccaacaggcaatgcctctaaaaatcacccaataaagacaggcttctcatcaaaaaaaaaaaaaaaaaaaaaaaaaaaaaaaaaaaaaaaaaaaaaaaaa

SEQ ID NO: 112 - DNA, 588 bp, homo sapiens
atgagcatcacggacgtgctcagtgctgatgacattgcagcagcgctccaggaatgccaagacccagacacttttgaaccccaaaaattcttccagacgtcaggcctctccaagatgtcagccagtcaggtgaaggatgttttccggttcatagacaacgaccagagcgggtatctggatgaagaagagcttaagtttttcctccagaagtttgagagtggtgccagagaactgaccgagtcagaaaccaagtccttgatggctgcggcggataatgatggagatgggaaaattggagcagaggaattccaggaaatggtgcattcttaaaagccccagtctctggagaaaagagagaaagggataatcacctggaaggattccaaagccctgggaatggggaaccccacatcccatccctacctaatttgttaattttccctgaaaaccttctgcagtttgctcattgttttagcgaggtcacgagagagtcactcatgactttcttggtggtgggtatatgccctgacaacttctgtaagccccccttcccccaacaggcaatgcctctaaaaatcacccaataaa

SEQ ID NO: 113 - DNA, 912 bp, homo sapiens
atgagcttctcttccctgcctactgaaatacagtcattactctttctgacatttctaaccatctacctggtcaccctgatgggaaactgcctcatcattctggttaccctagctgaccccatgctacacagccccatgtacttcttcctcagaaacttatctttcctggagattggcttcaacctagtcattgtgcccaaaatgctggggaccctgcttgcccaggacacaaccatctccttccttggctgtgccactcagatgtatttcttcttcttctttggagtggctgaatgcttcctcctggctaccatggcatatgaccgctatgtggccatctgcagtcccttgcactacccagtcatcatgaaccaaaggactcgtgccaaactggctgctgcctcctggttcccaggctttcctgtagctactgtgcagaccacatggctcttcagttttccattctgtggcaccaacaaggtgaaccacttcttctgtgacagcccacctgtgctgaggctggtctgtgcagacacagcactctttgagatctacgccatcgtcggaaccattctggtggtcatgatcccctgcttgctgatcttgtgttcctatactcacattgctgctgccatcctcaagatcccatcagctaaagggaagaataaagccttttctacatgttcctcacacctccttgttgtctctcttttctatatatcattaagcctcacctacttccggcctaaatcaaataattcacctgagggcaagaagctgctatcattgtcctacactgttatgactcccatgttgaaccccattatctacagcctgagaaataacgaggtgaagaatgccctcagcaggacggtctctaaggccctagccctcagaaactgtatcccatag

SEQ ID NO: 114 - DNA, 933 bp, homo sapiens
atggaaagcaatcagacctggatcacagaagtcatcctgttgggattccaggtggacccagctctggagttgttcctctttgggtttttcttgctattctacagcttaaccctgatgggaaatgggattatcctggggctcatctacttggactctagactgcacacacccatgtatgtcttcctgtcacacctggccattgtggacatgtcctatgcctcgagtactgtccctaagatgctagcaaatcttgtgatgcacaaaaaagtcatctcctttgctccttgcatacttcagacttttttgtatttggcgtttgctattacagagtgtctgattttggtgatgatgtgctatgatcggtatgtggcaatctgtcaccccttgcaatacaccctcattatgaactggagagtgtgcactgtcctggcctcaacttgctggatatttagctttctcttggctctggtccatattactcttattctgaggctgcctttttgtggcccacaaaagatcaaccactttttctgtcaaatcatgtccgtattcaaattggcctgtgctgacactaggctcaaccaggtggtcctatttgcgggttctgcgttcatcttagtggggccgctctgcctggtgctggtctcctacttgcacatcctggtggccatcttgaggatccagtctggggagggccgcagaaaggccttctctacctgctcctcccacctctgcgtggtggggcttttctttggcagcgccattgtcatgtacatggcccccaagtcaagccattctcaagaacggaggaagatcctttccctgttttacagccttttcaacccgatcctgaaccccctcatctacagccttaggaatgcagaggtgaaaggggctctaaagagagtcctttggaaacagagatcaatgtga

SEQ ID NO: 115 - DNA, 993 bp, homo sapiens
atgtgttcttttttcttgtgccaaacaggtaaacaggcaaaaatatcaatgggagaagaaaaccaaacctttgtgtccaagtttatcttcctgggtctttcacaggacttgcagacccagatcctgctatttatccttttcctcatcatttatctgctgaccgtgcttggaaaccagctcatcatcattctcatcttcctggattctcgccttcacactcccatgtatttttttcttagaaatctctcctttgcagatctctgtttctctactagcattgtccctcaagtgttggttcacttcttggtaaagaggaaaaccatttctttttatgggtgtatgacacagataattgtctttcttctggttgggtgtacagagtgtgcgctgctggcagtgatgtcctatgaccggtatgtggctgtctgcaagcccctgtactactctaccatcatgacacaacgggtgtgtctctggctgtccttcaggtcctgggccagtggggcactagtgtctttagtagataccagctttactttccatcttccctactggggacagaatataatcaatcactacttttgtgaacctcctgccctcctgaagctggcttccatagacacttacagcacagaaatggccatcttttcaatgggcgtggtaatcctcctggcccctgtctccctgattcttggttcttattggaatattatctccactgttatccagatgcagtctggggaagggagactcaaggctttttccacctgtggctcccatcttattgttgttgtcctcttctatgggtcaggaatattcacctacatgcgaccaaactccaagactacaaaagaactggataaaatgatatctgtgttctatacagcggtgactccaatgttgaaccccataatttatagcttgaggaacaaagatgtcaaaggggctctcaggaaactagttgggagaaagtgcttctctcataggcagtga

SEQ ID NO: 116 - DNA, 939 bp, homo sapiens
atggcaagggagaattcgaccttcaactccgacttcatcctcctgggaatcttcaatcacagccccacccacaccttcctcttctttctggtcctggccatcttttcagtggccttcatgggaaactctgtcatggttctcctcatctacctggacacccagctccacacccccatgtacctcctcctcagccaactgtccctcatggacctcatgctcatctgcaccaccgtacccaagatggccttcaactacctgtctggcagcaagtccatttctatggctggttgtgccacacaaattttcttctatacatcactgcttggctctgagtgctttcttttggctgttatggcttatgaccgctacactgccatttgccaccctctaagatacaccaatctcatgagccctaaaatttgtggacttatgactgccttttcctggatcctgggctctacggatggaattattgatgttgtagcaacattttccttctcctactgtgggtctcgggaaatagcccacttcttctgtgacttcccctccctactaatcctctcatgcagtgacacatcaatatttgaaaagattcttttcatctgctgtatagtaatgattgttttccctgttgcaatcatcattgcttcctatgctcgagttatcctggctgtcattcacatgggatctggagagggtcgtcgcaaagcttttactacttgttcctctcacctcttggtggtgggaatgtactatggagcagctttgttcatgtacatacggcccacatctgatcgctccccaacacaggacaagatggtgtctgtattctacaccatcctcactcccatgttgaatcccctcatctacagcctccgcaacaaggaggtgaccagagcattcatgaagatcttaggaaagggcaagtctggagagtga

SEQ ID NO: 117 - DNA, 975 bp, homo sapiens
atgggcatggagggtcttctccagaactccactaacttcgtcctcacaggcctcatcacccatcctgccttccccgggcttctctttgcaatagtcttctccatctttgtggtggctataacagccaacttggtcatgattctgctcatccacatggactcccgcctccacacacccatgtacttcttgctcagccagctctccatcatggataccatctacatctgtatcactgtccccaagatgctccaggacctcctgtccaaggacaagaccatttccttcctgggctgtgcagttcagatcttcctctacctgaccctgattggaggggaattcttcctgctgggtctcatggcctatgaccgctatgtggctgtgtgcaaccctctacggtaccctctcctcatgaaccgcagggtttgcttattcatggtggtcggctcctgggttggtggttccttggatgggttcatgctgactcctgtcactatgagtttccccttctgtagatcccgagagatcaatcactttttctgtgagatcccagccgtgctgaagttgtcttgcacagacacgtcactctatgagaccctgatgtatgcctgctgcgtgctgatgctgcttatccctctatctgtcatctctgtctcctacacgcacatcctcctgactgtccacaggatgaactctgctgagggccggcgcaaagcctttgctacgtgttcctcccacattatggtggtgagcgttttctacggggcagccttctacaccaacgtgctgccccactcctaccacactccagagaaagataaagtggtgtctgccttctacaccatcctcacccccatgctcaacccactcatctacagcttgaggaataaagatgtggctgcagctctgaggaaagtactagggagatgtggttcctcccagagcatcagggtggcgactgtgatcaggaagggctag

SEQ ID NO: 118 - DNA, 972 bp, homo sapiens
atgggcatggagggtcttctccagaactccactaacttcgtcctcacaggcctcatcacccatcctgccttccccgggcttctctttgcagtagtcttctccatctttgtggtggctataacagccaacttggtcatgattctgctcatccacatggactcccgcctccacacacccatgtacttcttgctcagccagctctccatcatggataccatctacatctgtatcactgtccccaagatgctccaggacctcctgtccaaggacaagaccatttccttcctgggctgtgcagttcaaatcttctacctgaccctgattggaggggaattcttcctgctgggtctcatggcctatgaccgctatgtggctgtgtgcaaccctctacggtaccctctcctcatgaaccgcagggtttgcttattcatggtggtcggctcctgggttggtggttccttggatgggttcatgctgactcctgtcactatgagtttccccttctgtagatcccgagagatcaatcactttttctgtgagatcccagccgtgctgaagttgtcttgcacagacacgtcactctatgagaccctgatgtatgcctgctgcgtgctgatgctgcttatccctctatctgtcatctctgtgtcctacacgcacatcctcctgactgtccacaggatgaactctgctgagggccggcgcaaagcctttgctacgtgttcctcccacattatggtggtgagcgttttctacggggcagccttctacaccaacgtgctgccccactcctaccacactccagagaaagataaagtggtgtctgccttctacaccatcctcacccccatgctcaacccactcatctacagcttgaggaataaagatgtggctgcagctctgaggaaagtactagggagatgtggttcctcccagagcatcagggtggcgactgtgatcaggaagggctag

SEQ ID NO: 119 - DNA, 936 bp, homo sapiens
atggagatggaaaactgcaccagggtaaaagaatttattttccttggcctgacccagaatcgggaagtgagcttagtcttatttcttttcctactcttggtgtatgtgacaactttgctgggaaacctcctcatcatggtcactgttacctgtgaatctcgccttcacacgcccatgtattttttgctccataatttatctattgccgatatctgcttctcttccatcacagtgcccaaggttctggtggaccttctgtctgaaagaaagaccatctccttcaatcattgcttcactcagatgtttctattccaccttattggaggggtggatgtattttctctttcggtgatggcattggatcgatatgtggccatctccaagcccctgcactatgcgactatcatgagtagagaccattgcattgggctcacagtggctgcctggttggggggctttgtccactccatcgtgcagatttccctgttgctcccactccctttctgcggacccaatgttcttgacactttctactgtgatgtccaccgggtcctcaaactggcccatacagacattttcatacttgaactactaatgatttccaacaatggactgctcaccacactgtggtttttcctgctcctggtgtcctacatagtcatattatcattacccaagtctcaggcaggagagggcaggaggaaagccatctccacctgcacctcccacatcactgtggtgaccctgcatttcgtgccctgcatctatgtctatgcccggcccttcactgccctccccatggataaggccatctctgtcaccttcactgtcatctcccctctgctcaaccccttgatctacactctgaggaaccatgagatgaagtcagccatgaggagactgaagagaagacttgtgccttctgatagaaaatag

SEQ ID NO: 120 - DNA, 924 bp, homo sapiens
atggaaacagggaacctcacgtgggtatcagactttgtcttcctggggctctcgcagactcgggagctccagcgtttcctgtttctaatgttcctgtttgtctacatcaccactgttatgggaaacatccttatcatcatcacagtgacctctgattcccagctccacacacccatgtactttctgctccgaaacctggctgtcctagacctctgtttctcttcagtcactgctcccaaaatgctagtggacctcctctctgagaagaaaaccatctcttaccagggctgcatgggtcagatcttcttcttccactttttgggaggtgccatggtcttcttcctctcagtgatggcctttgaccgcctcattgccatctcccggcccctccgctatgtcaccgtcatgaacactcagctctgggtggggctggtggtagccacctgggtgggaggctttgtccactctattgtccagctggctctgatgctcccactgcccttctgtggccccaacattttggataacttctactgtgatgttccccaagtactgagacttgcctgcactgacacctcactgctggagttcctcaagatctccaacagtgggctgctggatgtcgtctggttcttcctcctcctgatgtcctacttattcatcctggtgatgctgaggtcacatccaggggaggcaagaaggaaggcagcttccacctgcaccacccacatcatcgtggtttccatgatcttcgttccaagcatttacctctatgcccggcccttcactccattccctatggacaagcttgtgtccatcggccacacagtcatgacccccatgctcaaccccatgatctataccctgaggaaccaggacatgcaggcagcagtgagaagattagggagacaccggctggtttga

SEQ ID NO: 121 - DNA, 939 bp, homo sapiens
atggctgatgataattttacagttgtcactgagtttattcttttgggattgacagatcatgctgaactaaaagctgtgctttttgtggtgttcctggtgatttacgccattaccttgttgaggaatctgggcatgatcctcttaatccaaatcacctccaaactccacacacccatgtactttttactcagctgtctttcatttgtggatgcctgctattcatctgcaattgcacccaaaatgctggtgaacctcctggttgtgaaggcaacaatttctttctctgcttgcatggtacagcatttgtgtttcggagtgttcatcaccacagaaggcttcttactgtcagtgatggcctatgaccgctatgtggccattgtgagtcccttgctttacactgtagccatgtctgatagaaagtgtgtggagcttgtcacaggatcatggataggtggaatagttaacacattaatccacacaatcagcttgaggagactgtccttttgtaggctaaatgctgtcagccacttcttctgtgacattccttcactgctaaagctgtcatgttctgacacctccatgaatgagttgttgctgttaaccttctccggagtcattgccatggccaccttcttgactgtgatcatttcctacatcttcattgcttttgctagcctaaggatccactcagcatcaggcagacagcaagccttctccacctgtgcctctcacctgactgctgtgaccatattctatggtaccttaatctttagctacattcagccaagctcccagtattttgtggaacaagagaaagtggtttctatgttctatacgctagggattcccatgttaaacctgttgatacacagtttgagaaacaaggacgtaaaggaggcagtgaaaagggccatagaaatgaaacatttcctctgttaa

SEQ ID NO: 122 - DNA, 948 bp, homo sapiens
atgttgtccccaaaccacaccatagtgacagaattcattctcttaggactgacagacgacccagtgctagagaagatcctgtttggggtgttcctggcgatctacctaatcacactggcaggcaacctgtgcatgatcctgctgatcaggaccaattcccaactgcaaacacccatgtatttcttccttggtcacctctcctttgtagacatttgctattcttccaatgttactccaaatatgctgcacaatttcctctcagaacagaagaccatctcctacgctggatgcttcacacagtgtcttctcttcatcgccctagtgatcactgagttttacttccttgcttcaatggcattggatcgctatgtagccatttgcagccctttacattacagttccaggatgtccaagaacatttgcatctctctggtcactgtgccttacatgtatggcttccttaatgggctctctcagacactgctgacctttcacttatccttctgtggctcccttgaaatcaatcatttctactgcgctgatcctcctcttatcatgctggcctgctctgacacccgtgtcaaaaagatggcaatgtttgtagttgcaggctttactctctcaagctctctcttcatcattcttctgtcctatcttttcatttttgcagcgatcttcaggatccgttctgctgaaggcaggcacaaagccttttctacgtgtgcttcccacctgacaatagtcactttgttttatggaaccctcttctgcatgtacgtaaggcctccatcagagaagtctgtagaggagtccaaaataattgcagtcttttatacttttttgagcccaatgctgaacccattgatctatagcctacggaacagagatgtaatccttgccatacaacaaatgattaggggaaaatccttttgtaaaattgcagtttag

SEQ ID NO: 123 - DNA, 939 bp, homo sapiens
atgatgggtagaaggaatgacacaaatgtggctgacttcatccttacgggactgtcagactctgaagaggtccagatggctctgtttatgctatttctcctcatatacctaattactatgctggggaatgtggggatgctattgataatccgcctggacctccagcttcacactcccatgtattttttccttactcacctgtcatttattgacctcagttactcaactgtcgtcacacctaaaaccttagcgaacttactgacttccaactatatttccttcacgggctgctttgcccagatgttctgttttgtcttcttgggtactgctgaatgttatcttctctcctcaatggcctatgatcgctatgcagcgatctgcagtcctctacactacacagttattatgcccaaaaggctctgcctcgctctcatcactgggccttatgtgattggctttatggactcctttgtcaatgtggtttccatgagcagattgcatttctgtgactcaaacataattcatcactttttctgtgacacttccccaattttagctctgtcctgcactgacacagacaacactgaaatgctgatattcattatcgctggttccaccctgatggtgtcccttatcacaatatctgcatcctatgtgtccattctctctaccatcctgaaaattaattccacttcaggaaagcagaaagctttctctacttgcgtctctcatctcttgggagtcaccatcttctatggaactatgatttttacttacttaaagccaagaaagtcttattccttgggaagagatcaagtggctcctgtgttttatactattgtgattcccatgctgaatccactcatttatagtcttagaaacagagaagtgaaaaatgctctcattagagtcatgcagagaagacaggactccaggtag

SEQ ID NO: 124 - DNA, 918 bp, homo sapiens
atgcagaggagcaatcatacagtgactgagtttatactgctgggcttcaccacagacccaggaatgcagctgggcctcttcgtggtgttcctgggcgtgtactctctcactgtggtaggaaatagcaccctcatcgtgttgatctgtaatgactcctgcctccacacacccatgtattttttcactggaaatctgtcgtttctggatctctggtattcttctgtctacaccccaaagatcctagtgacctgcatctctgaagacaaaagcatctcctttgctggctgcctgtgtcagttcttcttctctgcagggctggcctatagtgagtgctacctgctggctgccgtggcttatgaccgctacgtggccatctccaagcccctgctttatgcccaggccatgtccataaagctgtgtgcattgctggtagcagtctcatattgtggtggctttattaactcttcaatcatcaccaagaaaacgttttcctttaacttctgccgtgaaaacatcattgatgactttttctgtgatttgcttcccttggtggagctggcctgtggcgagaagggcggctataaaattatgatgtacttcctgctggcctccaatgtcatctgccccgcagtgctcatcctggcctcctacctctttatcatcaccagtgtcttgaggatctcctcctccaagggctacctcaaagccttctccacatgctcctcccacctgacctctgtcactttatactatggctccattctctacatctacgctctccccagatctagctattcttttgatatggacaaaatagtttctacattttacactgtggtattccccatgttgaatctcatgatctacagcctaaggaataaggatgtgaaagaggctctgaaaaaacttctcccataa

SEQ ID NO: 125 - DNA, 844 bp, homo sapiens
cagacacagagtaaacttttgctgggctccaagtgaccgcccatagtttattataaaggtgactgcaccctgcagccaccagcactgcctggctccacgtgcctcctggtctcagtatggcgctgtcctgggttcttacagtcctgagcctcctacctctgctggaagcccagatcccattgtgtgccaacctagtaccggtgcccatcaccaacgccaccctggaccggatcactggcaagtggttttatatcgcatcggcctttcgaaacgaggagtacaataagtcggttcaggagatccaagcaaccttcttttactttacccccaacaagacagaggacacgatctttctcagagagtaccagacccgccagaaccagtgcttctataactccagttacctgaatgtccagcgggagaatgggaccgtctccagatacgagggaggccgagaacatgttgctcacctgctgttccttagggacaccaagaccttgatgtttggttcctacctggacgatgagaagaactgggggctgtctttctatgctgacaagccagagacgaccaaggagcaactgggagagttctacgaagctctcgactgcttgtgcattcccaggtcagatgtcatgtacaccgactggaaaaaggataagtgtgagccactggagaagcagcacgagaaggagaggaaacaggaggagggggaatcctagcaggacacagccttggatcaggacagagacttgggggccatcctgcccctccaacccgacatgtgtacctcagctttttccctcacttgcatcaataaagcttctgtgtttggaacagctaa

SEQ ID NO: 126 - DNA, 8778 bp, homo sapiens
atgggagtcctggcgtctgcgctctgctggctgctttgtgtctggctgccctggggtgagcaggcagccgagtccctgcgggtgcagcgcctcggtgagagggttgtggactcagggaggtcgggggctcgaggaatgagaaacgttaaaggaatgaggaatgggcccgcgcagactcgtgtttcctccagcagcagccaccaggaggcgacccttgccatgggggacaaggctacagtcgtgggaggccagcaggctgaagccccagactccgtggccatgtcttcctgggaaaggcggctccatcgggccaagtgtgcaccatcctacttgttctcctgcttcaatggaggcgagtgtgtgcacccagccttctgtgactgcagacgcttcaatgccactggaccgcgctgccagatggtgtacaatgccggccctgagagggacagcatttgccgggcgtgggggcagcaccacgtggagacatttgatgggctctactactacctctccggaaagggcagctacaccctggtgggtcgccatgagcccgagggacagagcttctccatccaggtacacaatgacccgcagtgtggctcttcaccctacacctgctccagggctgtcagcctcttctttgtgggtgagcaggagatccatctggccaaggaggtcacccatggaggcatgagggtccaactgccacatgtcatggggagcgcgcgtctgcagcagcttgccggctatgtcatcgtgcggcatcagtcagccttcacactggcctgggatggtgcctcggctgtctacatcaagatgagtccagagcttctgggctggacccatgggctgtgtgggaacaacaatgctgaccccaaggatgatctggtgaccagctctgggaagctgactgacgacgtggttgagtttgtgcacagctggcaggagcaggcccctaaccagcctccagggcccacaacttcctccctgcctcgcccaccgtgcctacagcagaacccaggaaccatgcagggcgtgtacgagcagtgtgaggctctactgcggcccccctttgacgcctgccacgcctacgtcagccctctgcccttcacagccagttgtaccagtgatctctgccaatcaatgggtgatgtagccacctggtgccgggcactggcggagtatgcccgggcgtgtgcccaggcagggcggcccttgcaaggctggaggacccagctccggcaatgcactgtgcactgcaaggagaaggcctttacctacaatgagtgcatcgcctgctgccctgcctcctgccatccccgggcatcctgtgtggacagtgagatcgcctgtgtggacggctgctattgccccaatgggctcatcttcgaggatgggggctgcgtggcaccagctgagtgtccctgtgagtttcacgggactctgtacccacctggctctgtggtgaaggaagactgcaatacttgcacatgcacctcaggcaagtgggagtgcagcacagctgtctgcccagctgagtgctcagtgactggtgacattcacttcacaacctttgatggccgccggtacacgttccccgccacatgtcagtacatcctggccaagagccgctcttcgggcaccttcaccgtgacattgcagaatgccccatgtggcctgaaccaagatggagcctgtgtccagtcagtgtcagtgattctgcaccaggaccctcggaggcaggtgaccctgacccaggcaggggatgtccttctgtttgaccagtacaagatcatcccgccatacacagatgatgcctttgagatccgtaggctgtcctccgtgttcctgcgggtgaggacgaacgtgggcgtgcgggtgctctacgaccgtgaagggctccgactgtacctgcaagtggaccagcgatgggtggaggataccgtgggcctctgcggcaccttcaatggcaacacgcaggatgacttcctgtctccagtgggtgtacctgagagcaccccacaactttttggcaattcctggaaaacactttctgcttgctccccgctggtctctggctcccctctggacccctgcgatgtgcacctgcaagccgcctcctactcagtgcaggcctgcagcgtgctcacgggggagatgtttgcgccctgctctgcgttcctgagccccgtgccctactttgagcagtgccgcagggatgcctgccgctgcgggcagccctgcctgtgcgccacactggcccactacgcccacctgtgccggcgccatgggctccccgttgatttccgcgcccgcctgccagcctgtgcactgtcctgtgaggcctccaaggagtatagcccctgcgtggccccgtgtggacgtacctgccaggacctggccagccctgaggcctgtggggttgatggtggcgatgacctgagcagagacgagtgtgtggagggctgtgcctgcccaccggacacctatctggacacccaggctgacctctgtgtcccccggaaccagtgctcctgccacttccagggagtggactatccccccggagacagtgacatcccatccctgggccactgccactgcaaagatggagtcatgagctgtgatagcagagccccagctgctgcctgcccagcaggccaggtcttcgtgaactgcagcgacctgcacacggacctggagctgagcagggagaggacgtgtgagcagcaactgctgaacctgagcgtgtcagcccgtggcccctgcctctcgggctgcgcctgtccccagggtctgctcagacacggggatgcatgtttcctgccagaggagtgcccctgcacttggaaggggaaggagtatttccctggggaccaggtgatgtctccttgccatacctgtgtgtgccagcggggctcattccagtgcaccctgcacccttgcgcctccacctgcactgcctatggggaccggcattaccgcacgtttgatgggctcccgtttgacttcgtgggggcatgcaaagtgcacctggtcaagagcacatcagatgtcagcttctctgtgattgtagagaatgtgaactgctacagctctggcatgatctgcaggaaatttatttccatcaacgttgggaactcactcattgtctttgatgatgactccggaaatcctagtccagagagcttcctggatgacaagcaggaggtccacacatggcgagtgggatttttcacactggtgcatttcccacaggagcacatcaccctcttgtgggaccagagaaccacagtgcacgtccaggctgggcctcagtggcagggccagctggcgggcctctgtgggaactttgacttaaaaaccatcaatgagatgaggaccccggagaacctagagctaactaacccccaggagtttggcagcagttgggctgcagttgagtgcccagacaccctcgatcctcgggatatgtgtgtcctgaatcctctccgagaaccatttgccaagaaggagtgcagcatcctgctcagtgaggtgtttgagatctgccaccctgtggttgatgtcacttggttttactcaaactgcctgacagacacatgtggctgcagccagggtggtgactgtgagtgcttctgtgccagcgtctccgcttatgcccaccagtgttgccagcatggggtggctgttgactggcgaaccccccgcctctgcccgtatgactgtgacttctttaacaaagtgctaggtaagggcccctatcagctatccagcttggcagccggtggtgctctggtgggcatgaaggcggtgggcgatgacatagtcctagtgaggacagaggatgtggcgccagcagacattgtgagcttcctgctgacagctgctctgtacaaggccaaggcccatgacccagatgtggtgtccctggaggcagcagacagacccaacttcttccttcacgtcacagccaacgggtctctggagctggctaagtggcagggccgtgacaccttccaacagcatgcctccttcttgctgcaccgggggacacggcaggcaggcctggtggccctggagtccctggccaagcccagctccttcctctatgtgtcgggcgcggtgctggccctgcggctgtacgaacacacagaggtgttccgccggggcacactcttccgccttctggatgccaagccctcgggggctgcctaccccatctgcgagtggcgctacgatgcctgtgccagcccctgcttccaaacctgccgggacccacgggcagccagctgccgggacgtacccagggtagaaggctgtgtccctgtgtgccccaccccccaggtcctggatgaagtcacacagagatgtgtctacttggaggactgtgtggagccagcagtttgggttcccacagaggcccttggcaatgagaccctccctcccagtcaagggttgcccactcccagtgatgaggagccacagctgtcacaggaaagccccaggacccccacccacaggccagccctcaccccagctgccccactcaccacagccctgaacccaccagtgacagccactgaggagccagtggtgtctccaggccccacccagaccaccctgcagcagccactggagctcactgcatctcaactccccgccggccccacggagtccccagccagcaagggagtgactgccagcctcctggccatcccccatacaccagagtcctcatccctccctgttgcactgcagacacccacacctggcatggtgtcaggtgccatggagacaacaagggtgactgtgatctttgcaggaagccctaacatcacagtctcctcccggtcgccccctgcccctcgcttcccgctcatgaccaaggctgtgacagtccgaggccatggctccttgcctgttaggacgacacccccacagccctccttgacagcaagtccctcctccagacctgtggcttcccctggagccatctccaggtcccccacctcctcgggatcccacaaggctgtgctgacacctgcagtaactaaggtcataagcaggacaggggtcccccagcccacccaggcccagagtgcttcaagtcccagcacccctctaactgtggctggaacagcagcagaacaggttcctgtcagtccccttgcaaccaggagcttggagatagtgctatccacagagaagggcgaagccgggcacagccagcccatgggctcgcctgcctccccacagccacacccactcccctctgcaccaccccgcccagcccagcataccaccatggccaccaggtctccagctctgcccccagagaccccagctgccgccagcctgtcaacagccactgatgggctggcagccacacccttcatgtcccttgagtcaactcgtccctcccagctcctctctggcctgcctcccgacaccagcctgcccctggccaaggtgggcacatctgccccagtggccacacccggccccaaagcctctgtcatcaccactccactccagccacaggccacgactctgcctgctcagacacttagcccagtactgcctttcactccagcagcaatgacccaggcgcacccacccactcacatagcacccccagcagcaggcacagctccaggcctgctgctgggagccacattgccaacctctggagtcctgcctgtggctgagggcacggcctccatggtatctgttgtcccacgaaagagcaccacagggaaggtggccatcctatccaagcaagtgtctctgcccacttccatgtatggttctgcagagggtgggcccacagagctcacgcctgctacgagccaccctctcacgcccttggtggctgagcccgagggagcccaggcaggcacagctctgccagtgcccacatcctatgccctgagccgtgtctcagccaggacggccccccaagacagcatgctggttctgttgcctcagctggctgaggcccatggaacctcggcagggcctcacctggcagcagagccggtggacgaggccaccacagaaccatctgggcgctcagccccagccctgagcatcgtagagggtttggcggaggctttggcaactaccactgaggccaatacatccaccacctgtgttccaatcgccgagcaggactgcgtccgccacatctgcctggagggccagctgattcgcgtgaatcagtcccagcactgtccccagggtgctgctccccctcgctgtgggatcctgggcctcgccgtgcgggtgggtggggaccgctgctgcccactctgggagtgtgcctgccggtgctcaatcttccctgacctgagcttcgtgaccttcgatgggagccacgtagctctgttcaaggaggccatctacatcctcagccagagcccagatgaaatgctcaccgtccatgtactggactgcaaaagtgccaacctggggcacctgaactggcccccgttctgtctggtgatgttgaacatgactcacttggcccatcaggtcactattgatcgcttcaaccgaaaggtgactgtggacttgcagcctgtgtggccaccggtgagcaggtatggattcagaattgaggacacaggccacatgtacatgatcctgactccctcagacatccagatccagtggctccacagctcaggactcatgatcgtggaggccagcaaaaccagcaaggcccagggccatggcctgtgcggtatctgtgatggagatgcagccaatgaccttaccctgaaggatggctcagtggtgggtggggctgaggaccctgctccctttctggacagctggcaggtgcccagctccctgacctcagtgggccagacccgcttccgcccagacagctgcgccacaactgactgctcgccctgccttcgcatggtgtccaaccgcaccttcagtgcctgccaccgctttgtgcctccggagtcattctgtgagctgtggatccgggacaccaagtacgtgcagcagccctgcgtggccctgactgtgtacgtggccatgtgccacaaatttcatgtgtgcatcgagtggcggcgctctgactactgccccttcctgtgctccagcgactccacataccaggcatgtgtgacagcctgtgagccacccaagacatgccaggatgggatactagggcctctggacccagagcactgccaggtgctgggcgagggctgcgtctgctccgagggcaccatcttacaccggcgccactctgcactctgcatcccggaggccaagtgcgcctgcactgacagcatgggggtgccgagggccctgggggagacctggaacagctccctcagcggctgctgccagcaccagtgccaagccccagacaccattgtcccggtggatctgggctgccccagtccccgccctgagagctgcctgcgattcggggaggtggccttgctcctacccaccaaggacccctgctgcctggggactgtctgtgtgtgtaaccagactctgtgtgagggtctcgcccccacatgccgcccaggccaccgcctcctcacccacttccaggaggactcctgctgccccagctacagctgtgagtgtgacccagatctctgtgaggcagagctggtccccagctgccgacaggaccagatcctgatcacgggccgcctgggggactcctgctgcacctcctacttctgcgcctgtggtgactgtccagactccatccccgaatgtcaagaaggggaggcgctcactgtgcacaggaataccacggaactctgctgccctctgtaccagtgtgtgtgtgagaacttccgctgtccccaagtgcagtgtggcctgggcactgccctggtggaggtgtggagccccgaccgctgctgcccctacaaatcctgtgaatgtgactgtgacacaatcccggtgccccggtgccatctgtgggagaaatcccagctggatgaggagttcatgcacagcgtggagaatgtgtgtggctgcgccaagtacgagtgtgtgaaggccccggtgtgtctgagccgcgagctgggtgtgatgcagcccggccagacagtggtggagctctcagcagatggcgtgtgccacacctcccgctgcaccaccgtgctcgaccctctcaccaacttctaccagatcaacaccacctccgtgctctgtgacatccactgtgaggcgaaccaggagtacgagcacccgcgggacctcgctgcctgctgcggctcctgcaggaacgtgtcctgtctcttcaccttccccaatggcaccacctccctgttcttgcccggggcatcctggatcgcagactgcgcccgccaccactgcagcagcacgcccctgggtgccgtgctggtccgctctcccataagctgcccaccgctcaatgagactgagtgtgccaaggttgggggttccgtggtaccttccttggaaggatgctgcaggacctgtaaggaggatgggcgctcctgcaagaaggtgaccatccgcatgaccatccgcaagaatgaatgcaggagcagcacccctgtgaacctagtgtcctgcgatgggaggtgcccatccgccagcatctacaactacaacatcaacacctatgcccgattctgcaagtgctgccgtgaggtgggcctgcagcggcgctctgtgcagctcttctgtgccaccaatgccacctgggtgccctatacagtgcaggagcccaccgactgtgcctgccagtggtcctga

SEQ ID NO: 127 - DNA, 513 bp, homo sapiens
gagagtgtcttcattctttccgccatcttgattctttgtcactgaccgagactcagccgtgggaaatatgagtgagcatgtgagaacaagatcccaatcctcagaaagaggaaatgaccaagagtcttcccagccagttggatctgtgattgtccaggagcccactgaggaaaaacgtcaagaagaggaaccaccaactgataatcagggtattgcacctagtggggagatcgaaaatgaaggagcacctgccgttcaagggcctgacatggaagcttttcaacaggaactggctctgcttaagatagaggatgagcctggagatggtcctgatgtcagggaggggattatgcccacttttgatctcactaaagtgctggaagcaggtgatgcgcaaccataggtttcaagcaagacaaatgaagactgaaaccaagaacgttattcttaatctggaaatttgactgataatattctcttaataaagttttaagttttctgcaaagaaaaaaa

SEQ ID NO: 128 - DNA, 7233 bp, homo sapiens
agctgcaagttgggctgcaggggcagcgcatacactacaatggctgctggaaagaggcgtaaggaaacaatttccaggcccgccgcgtccagcccgaaatatgagaaaaaaattattagaaattccgcgggcggtgtagaggcggcggacgggccggagggaggatgttaaagccccgcgattggccaaaatgggaaggattggattccactctcttccacgaagagtcaatgggactggctaagatcaaagtctgaggctttttccatcagtaatcagtccctttttgctttcttttacgaccacatgaaacttgagaagccacctaaagctatatcatttagtggagttgggcagttcccaagtgtccaacaagaaggcctggtttaggctgcgatggccactgtcattcctggtgatttgtcagaagtaagagatacccagaaagtcccttcagggaaacgtaagcgtggtgaaaccaaaccaagaaaaaactttccttgccaactgtgtgacaaggcctttaacagtgttgagaaattaaaggttcactcctactctcacacaggagagaggccctacaagtgcatacaacaagactgcaccaaggcctttgtttctaagtacaaattacaaaggcacatggctactcattctcctgagaaaacccacaagtgtaattattgtgagaaaatgtttcaccggaaagatcatctgaagaatcacctccatacacacgaccctaacaaagagacgtttaagtgcgaagaatgtggcaagaactacaataccaagcttggatttaaacgtcacttggccttgcatgccgcaacaagtggtgacctcacctgtaaggtatgtttgcaaacttttgaaagcacgggagtgcttctggagcaccttaaatctcatgcaggcaagtcgtctggtggggttaaagaaaaaaagcaccagtgcgaacattgtgatcgccggttctacacccgaaaggatgtccggagacacatggtggtgcacactggaagaaaggacttcctctgtcagtattgtgcacagagatttgggcgaaaggatcacctgactcgacatatgaagaagagtcacaatcaagagcttctgaaggtcaaaacagaaccagtggatttccttgacccatttacctgcaatgtgtctgtgcctataaaagacgagctccttccggtgatgtccttaccttccagtgaactgttatcaaagccattcacaaacactttgcagttaaacctctacaacactccatttcagtccatgcagagctcgggatctgcccaccaaatgatcacaactttacctttgggaatgacatgcccaatagatatggacactgttcatccctctcaccacctttctttcaaatatccgttcagttctacctcatatgcaatttctattcctgaaaaagaacagccattaaagggggaaattgagagttacctgatggagttacaaggtggcgtgccctcttcatcccaagattctcaagcatcgtcatcatctaagctagggttggatcctcagattgggtccctagatgatggtgcaggagacctctccctatccaaaagctctatctccatcagtgaccccctaaacacaccagcattggatttttctcagttgtttaatttcatacctttaaatggtcctccctataatcctctatcagtggggagccttggaatgagctattcccaggaagaagcacattcttctgtttcccagctccccccacaaacacaggatcttcaggatcctgcaaacactatagggcttgggtctctgcactcactgtcagcagctttcaccagcagtttaagcacaagtaccaccctcccacgtttccatcaagcttttcagtaggattctgggacatggattcattacagaaatgtatgtgtagctgtgccctagatgaccatttttattttagtgcctactttaaaacagtataaaaatttctgcttttgtataatacaaattttcattaagccagtataaaatagaaactagcttttaaactgagctttggaaccatttgtgttcagttaagtttacctgggtattttgtcctgattcactgccaattgtcacattttaagacttttttttttccatataggaaagccattattagtagtaaacttttacaaatcccattttcaaattacttttagatcttaaaattttcatttttgtctaataacagtggctctaccttttgacatctggctcattaaaaaatttagcaatagaatgtaaattgtataaaaagtttgtgaataactcaagggtttaaattttcttactagcttctaaatggattaataatcaagtgcttcaaatgaattaagagtccagtttcggaagataataaatgtttgttagatacaccataatttcagatcagtatattctgaagactccctgttgtctggctaaaatatttgccatctttattatgagcctttaaggaaaacaaaccctaaacacaaagcatcagtatttatagcaaaaagagactctgttaggtgacatggcatttcgtgtcacttaatagttggccctaaattagtacacaggatattttgtcgtgtttcatccttcttaacatgctatcttttcatttaataatagtaatagtgtatggcattggggtcttcagagtcgatatataggtagatctctttagtcttttccacctttcacatccaaggggtgggtcaagtgcagccagcaatttattttcattgttggcccacggttagtccataatctagagccattgtggaactgcagccatgaggtgtgtttatcccacagtggattgactcagcctctgtgggtgacagacttctaagcaggaagatagacgtgaagcacatggttacatttgggaacttgtgtagggatcatggcccctgtagccagggttaaaaactggactttttagaagtaaagtaaaagcatatcgcttatatcatttcttgctgaatttgatatgtttttctttcccttaagaatcaaaagcagaaaacaaaaacaacagtcctactccgatgttatctttctgattcaatgtgaatccatctttccttgcaatattttggatggagaatttgaagttaaatgcattagaaaactacctgatgaactaccacaaagttttaagtgactagaaatatatacagtaaaatcccactttcatgcatctctgggaaatgataggagtattgcaaataagttgagtttgtagagggtaacaaagtaaagtaaaacaaacctatcttggttaacatgaaaataacaattgagaatatattatattcactgaataattataggcttttcctcacattagacaaccaacataatcttcttaaaggtctaattaatatatttttctaagggtcagttgggacattaacctaagaaacatatctattaagcacttgttaacaccttattttaggaccctttccgttggggatgggggcaagggtgggaggtttttagaagagtatatatctctttaaaaaaaaacagaaagaaaaatatttctgagcactcattagccctatatggaaacttctttcctttttgtagggccagttatcactgcagattgcaatgtttaccaagaatttctaaaaatgagtgcagattactgaatataatacattatttaaaatatttgggagtagtataatttgtggagaaatgtaaattgtaataatgtaaatgggggcttcaatatatatatataatacacacacacacacacatgcacacataccgcacttcatagaatcaaagttgctctctgaaggagctttggctcctgatattttatcatgctcctatatttttttaatccttggagcagtagtttttatacttatgtatttaaattttattatgaaaaattacatttattaaaaaagtgtgttccaaaggcattaaaattatatatgttaataaggaagtacatttttaaatttttcaaactgctcctagcttttgattaggagaatattttttctgaaagtaggcttttcgctctgcttcattactgcttcctttagtttctatgaaacagattgcttacctaaatctttagttgaatgattagtgttcaatattgctttaatcaccatataaaaggaaaaaaattggtgacagagcacaaatagaaaacctatttttaaatagaaatcacaaatagcaagtgtggaagcactactttattctgtttaaaatgtacttaagaagtcatcaaattagtgaactgagacattggccttagtaggctgtattcactgctaatttaaaaaagggagtaccaggatttattaagtaaagcattttggaaatggggaatagcgccatatatgtatgtatgtgtatgtgtgtgtgtgtgtgtgtatatatacacacacacacacatacttaaatcttgccctgcatgaaattcaaatacatggaggcacatcttcagggcaccagtgttaaaattttggagtcttaattttcatgtgtacacctctttgcctgttcccacccccagacttgaaataacacttcagagtaagagggaattcagctaatttgtttttaaaattgactgtagtggtcactaaaccctttttgagagaatttctattaaagatgaggcagactcgcttatttgaattgcacaatgttctaacaaggatgtaacacagaattggcttttttttccctagaaaaagattgtttgtttctatgtcaactagatatgattaaaaataagtattgccaatgctgttttcattctctagtggccagaatcattatccttgaaatttctggtagtgccttagcttggttaaaaaaaaaaaaaaaaaaaaaaaaaagggattaacattaaataaaagtagtttagaatttgggcctcagacaagatattgaacctcattcagtttcacttccacatgtatgtacaagttaggtcaccaaacacggaagtgtgagtgtggaaggatcttggcactgtaagcaatgctatccattgatgtatacaagtacctttatagttatcgatcactgttaaaactttcattttaaaatcctattaccaagttcagttttttaaaacttcaattgtcctggctgattatgcatcactctgtgtgcaacttttttatttcatttagtgtttctttcaagctgtgtatttttgcctatttgttgcttgtgctttatttttcttagtcatttgtggaatatagtgatatattgtgttaatttggacagtagcggtttttaaaaaccatatactgactgaaacatgagccagagccgattgctttattaagctaataatgaatgttaaagagtacatattttcaggatcgttcatctagtgagcaatacacatattataggccaatatttttttaaaaaatagagcttggtcaacctctatactacacatattacaagatatagcactttcaaaatgaatctaaacctttacagaaactttcttataggttatgccttttattttaagacttattataattcaagtgccattagatgatatatatgtaggcctttgatatataatgctttgtgtacaaaaatggtagatggtattttaaacaggtacatttttacagtgttttcttatcaatttgctatattgcacagaatcagtgtgtgtcttttcataaggttttacaatggtttatttttttacaaggtttacgtgtctcaaagcacactgtcttcccagtacgtaagttaaaaaataccagttcacccaagttgcttctagcctactgagatccatgtgacattggaggagatcttttaaatgtttagtattcgtcattagcaatggctggctgttagttctggtaaatgtgtgcctaagttgaatttgtcttgtttttctcacactgtgtcagcagccatgtctacaacacagataagtctgttgtgatcacatagatctacataagttgtgcagttttgtgctaaaaacccatagggagctcctttgggatcatagaaaagaagatcatgcaaccagcattggtgaaggcacactcagattgcacttagggcctttctatgatgttgtcaaccctctgaggatggaaggcagtgtcttttgatgttatctagcctagaaatgacacagaactattgctaatgtataaaacacttcattatataagcttcagtggtacagatgaaccagaatgaatgtttatcttctcagaaacactccttcaatattatattggatcatgctgctaatgtaacttgggctacaactcttcatggtgctacaaacttctctgtctcattcagtcgtatttttttatccatagaaaaaggactacattaggtgtaaaagtgtacaatatatttttatactgtgacttaatttgtcattaacaaacttttacaccaccacaatgtattcatgtgcacttgcaaaaggagatctcggacatgcaaatgttaccagaacaaacccagcttttgtccacaaggtgactgtaactcagaatggaaagtgggctttataatagggtgtggagtgaagaacatgctgtatgttactaacagccctttgaatttaacaaaaactgggaatccattaggaaacggattgcatcatacctgaacataagctggactgctgaaattgtatttttagctaatgaaaaagtgtttggactagtactctaaaaatgttctaatgataaagttttgagtcaaaatagaaaagaaaaaaatctgcattccaggccgaattttgtatatttttattgcatttaaaattgctattctgtaatattgggaaatcaagtggcttatcatgtatatcgtgtacttaaaatgtattcacaaactactgttgtatttgtataaaatatagacaaagatcatattttttgtgtgtgtataagctctgtaaaatagcaatcacattatgaagctgcagtgatactacattttaaacattcacatccaaagaagcagactatttattgtccatataccagatttaaaatattaatttgctgctaattaaataatagtactgcagcttcttgtggcctacagtgttatgtttgctgtaagaataagatatgtgaattccacaaaatatatgaataaaattatagaatggcttta

SEQ ID NO: 129 - DNA, 1371 bp, homo sapiens
atccttattctatatctcttggtatttagtgtaaaaattttaaaatctttacctagcaatcttgaggaagaaacttgataactgataatacatgagattgttacctaagtgaaatataatcctatatattcaacaaactttagagaaataagataaattttaaagtaaatgacttctgtagttttatagatcctccaaaccaatctagtctcagatctcaccttcatcatttctctcatttccttttggcctaattaatcaaaatccttcctagaatgttcatttctggccagtatgtcttcctgaatatgaataagaaataaaataccatttgatgtttgaaattatgggggtaatctcaatgacggaaatagatgaccaggaaaagggaaacgaatgcctgattcattatattcatgaagatatcaaaggtttataaagccaatatctgggaaagagaaaaccgtgagacttccagatcttctctggtgaagtgtgtttcctgcaacgatcacgaacatgaacatcaaaggatcgccatggaaagggtccctcctgctgctgctggtgtcaaacctgctcctgtgccagagcgtggcccccttgcccatctgtcccggcggggctgcccgatgccaggtgacccttcgagacctgtttgaccgcgccgtcgtcctgtcccactacatccataacctctcctcagaaatgttcagcgaattcgataaacggtatacccatggccgggggttcattaccaaggccatcaacagctgccacacttcttcccttgccacccccgaagacaaggagcaagcccaacagatgaatcaaaaagactttctgagcctgatagtcagcatattgcgatcctggaatgagcctctgtatcatctggtcacggaagtacgtggtatgcaagaagccccggaggctatcctatccaaagctgtagagattgaggagcaaaccaaacggcttctagagggcatggagctgatagtcagccaggttcatcctgaaaccaaagaaaatgagatctaccctgtctggtcgggacttccatccctgcagatggctgatgaagagtctcgcctttctgcttattataacctgctccactgcctacgcagggattcacataaaatcgacaattatctcaagctcctgaagtgccgaatcatccacaacaacaactgctaagcccacatccatttcatctatttctgagaaggtccttaatgatccgttccattgcaagcttcttttagttgtatctcttttgaatccatgcttgggtgtaacaggtctcctcttaaaaaataaaaactgactccttagagacatcaaaatctaaaatgaaaaaaaaaa

SEQ ID NO: 130 - DNA, 7311 bp, homo sapiens
gaactcgggttgcgcacttcccggcgctgggaacgcggagcggacgcagtctggccgccattgcgctgcggggaaagcggcctcttgtgtgagggcctgtgggattctccggatatggccggagtgtttccttatcgagggccgggtaacccggtgcctggccctctagccccgctaccggactacatgtcggaggagaagctgcaggagaaagctcgaaaatggcagcaattgcaggccaagcgctatgcagaaaagcggaagtttgggtttgtggatgcccagaaggaagacatgcccccagaacatgtcaggaagatcattcgagaccatggagacatgaccaacaggaagttccgccatgacaaaagggtttacttgggtgccctaaagtacatgccccacgcagtcctcaaactcctggagaacatgcctatgccttgggagcagattcgggatgtgcctgtgctgtaccacatcactggagccatttccttcgtcaatgagattccctgggtcattgaacctgtctacatctcccagtgggggtcaatgtggattatgatgcgccgagaaaaaagagataggaggcatttcaagaggatgcgttttcccccttttgatgatgaggagccgcccttggactatgctgacaacatcctagatgttgagccactggaggccattcagctagagctggaccctgaggaggacgcccctgtgttggactggttctatgaccaccagccgttgagggacagcaggaagtatgtaaatggctccacttaccagcgctggcagttcacactacctatgatgtcgactctctaccgcctggctaatcagctcctgacagacttggtggatgacaactacttctacctgtttgatttgaaggccttctttacgtccaaggcactcaatatggccattcctggaggccccaaatttgaacctcttgttcgagacatcaacctacaggatgaagactggaatgaattcaatgatattaacaagattatcatccggcagcctatccgcactgagtacaagattgcttttccttacttgtacaacaatcttccacaccatgtccacctcacctggtaccatactcccaatgttgtattcatcaaaactgaggatcctgacttgccagctttctactttgaccctttgatcaacccaatctcccataggcactcagtcaagagccaggaaccattgccggatgatgatgaggaatttgagctcccggagtttgtggagcccttcctgaaggacacacccctctatacagacaatacagccaatggcattgccctgctctgggccccgcggcccttcaacctacgctctggtcgcacccgtcgggccctggacataccccttgtcaagaactggtatcgggagcattgtcctgccgggcagcctgtgaaagtgagggtctcctaccagaagctgcttaagtactatgtgctgaatgccctgaagcatcggccccctaaggctcaaaagaagaggtatttgttccgctccttcaaagccaccaaattctttcagtccacaaagctggactgggtggaggttgggctccaggtttgccgccagggctacaacatgctcaaccttctcattcaccgcaaaaacctcaactacctgcacctggactacaacttcaacctcaagcctgtgaaaacgctcaccaccaaggaaagaaagaaatctcgttttgggaatgctttccacctgtgtcgggaagttctgcgtttgactaagctggtggtggatagtcacgtgcagtatcggctgggcaatgtggatgccttccagctggcagatggattgcagtatatatttgcccatgttgggcagttgacgggcatgtatcgatacaaatacaagctgatgcgacagattcgcatgtgcaaggacctgaagcatctcatctattatcgtttcaacacgggccctgtagggaagggtcctggctgtggcttctgggctgccggttggcgagtctggctctttttcatgcgtggcattacccctttattagagcgatggcttggcaacctcctggcccggcagtttgaaggtcgacactcaaagggggtggcaaagacagtaacaaagcagcgagtggagtcacattttgaccttgagctgcgggcagctgtgatgcatgatattctggacatgatgcctgaggggatcaagcagaacaaggcccggacaatcctgcagcacctcagtgaagcctggcgctgctggaaagccaacattccctggaaggtccctgggctgccgacgcccatagagaatatgatccttcgatacgtgaaggccaaggctgactggtggaccaacactgcccactacaaccgagaacggatccgccgaggggccactgtggacaagactgtttgtaaaaagaatctgggccgcctcacccggctctatctgaaggcagaacaggagcggcagcacaactacctgaaggacgggccttacatcacagcggaggaagcagtggcagtatataccaccacagtgcattggttggaaagccgcaggttttcacccatcccattccccccactctcctataagcatgacaccaagttgctcatcttggcattggagcggctcaaggaagcttatagtgtgaagtctcggttgaaccagtctcagagggaggagctaggtctgatcgagcaggcctacgataacccccacgaggcgctgtcccgcatcaagcgtcacctcctcacacagagagccttcaaagaggtgggcattgagttcatggatctgtatagccacctcgttccagtatatgatgttgagcccctggagaagataactgatgcttacctggaccagtacctgtggtatgaagccgacaagcgccgcctgttcccaccctggattaagcctgcagacacagaaccacctccgctgcttgtttacaagtggtgtcaaggcatcaataacctgcaggacgtgtgggagacgagtgaaggcgagtgcaatgtcatgctggaatcccgctttgagaagatgtatgagaagatcgacttgactctgctcaacaggctgctgcgcctcatcgtggaccacaacatagccgactacatgacagccaagaacaacgtcgtcatcaactataaggacatgaaccatacgaattcatatgggatcatcagaggcctgcagtttgcctcattcatcgtgcagtattatggcctggtgatggatttgcttgtattgggattgcaccgggccagtgagatggctgggccccctcagatgccaaatgactttctcagtttccaggacatagccactgaggctgcccaccccatccgtctcttctgcagatacattgatcgcatccatatttttttcaggttcacagcagatgaggctcgggacctgattcaacgttacctgacagagcaccctgaccccaataatgaaaacatcgttggctataataacaagaagtgctggccccgagatgcccgcatgcgcctcatgaaacatgatgttaacttaggccgggcggtattctgggacatcaagaaccgcttgccacggtcagtgactacagttcagtgggagaacagcttcgtgtctgtgtacagtaaggacaaccccaacctgctgttcaacatgtgtggcttcgagtgccgcatcctgcctaagtgccgcaccagctatgaggagttcacccacaaggacggggtctggaacctgcagaatgaggttactaaggagcgcacagctcagtgtttcctgcgtgtggacgatgagtcaatgcagcgcttccacaaccgcgtgcgtcagattctcatggcctctgggtccaccaccttcaccaagattgtgaataagtggaatacagctctcattggccttatgacatactttcgggaggctgtggtgaacacccaagagctcttggacttactggtgaagtgtgagaacaaaatccagacacgtatcaagattggactcaactccaagatgccaagtcggttccccccggttgtgttctacacccctaaggagttgggtggactcggcatgctctcaatgggccatgtgctcatcccccaatccgacctcaggtggtccaaacagacagatgtaggtatcacacactttcgttcaggaatgagccatgaagaagaccagctcattcccaacttgtaccgctacatacagccatgggagagcgagttcattgattctcagcgggtctgggctgagtacgcactcaagaggcaagaggccattgctcagaacagacgcctgactttagaagacctagaagattcatgggatcgtggcattcctcgaatcaataccctcttccagaaggaccggcacacactggcttatgataagggctggcgtgtcagaactgactttaagcagtatcaggttttgaagcagaatccgttctggtggacacaccagcggcatgatgggaagctctggaacctgaacaactaccgtacagacatgatccaggccctgggcggtgtggaaggcattctggaacacacactctttaagggcacttacttccctacctgggaggggcttttctgggagaaggccagtggctttgaggaatctatgaagtggaagaagctaactaatgctcagcgatcaggactgaaccagattcccaatcgtagattcaccctctggtggtccccgaccattaatcgagccaatgtatatgtaggctttcaggtgcagctagacctgacgggtatcttcatgcacggcaagatccccacgctgaagatctctctcatccagatcttccgagctcacttgtggcagaagatccatgagagcattgttatggacttatgtcaggtgtttgaccaggaacttgatgcactggaaattgagacagtacaaaaggagacaatccatccccgaaagtcatataagatgaactcttcctgtgcagatatcctgctctttgcctcctataagtggaatgtctcccggccctcattgctggctgactccaaggatgtgatggacagcaccaccacccagaaatactggattgacatccagttgcgctggggggactatgattcccacgacattgagcgctacgcccgggccaagttcctggactacaccaccgacaacatgagtatctacccttcgcccacaggtgtactcatcgccattgacctggcctataacttgcacagtgcctatggaaactggttcccaggcagcaagcctctcatacaacaggccatggccaagatcatgaaggcaaaccctgccctgtatgtgttacgtgaacggatccgcaaggggctacagctctattcatctgaacccactgagccttatttgtcttctcagaactatggtgagctcttctccaaccagattatctggtttgtggatgacaccaacgtctacagagtgactattcacaagacctttgaagggaacttgacaaccaagcccatcaacggagccatcttcatcttcaacccacgcacagggcagctgttcctcaagataatccacacgtccgtgtgggcgggacagaagcgtttggggcagttggctaagtggaagacagctgaggaggtggccgccctgatccgatctctgcctgtggaggagcagcccaagcagatcattgtcaccaggaagggcatgctggacccactggaggtgcacttactggacttccccaatattgtcatcaaaggatcggagctccaactccctttccaggcgtgtctcaaggtggaaaaattcggggatctcatccttaaagccactgagccccagatggttctcttcaacctctatgacgactggctcaagactatttcatcttacacggccttctcccgtctcatcctgattctgcgtgccctacatgtgaacaacgatcgggcaaaagtgatcctgaagccagacaagactactattacagaaccacaccacatctggcccactctgactgacgaagaatggatcaaggtcgaggtgcagctcaaggatctgatcttggctgactacggcaagaaaaacaatgtgaacgtggcatcactgacacaatcagaaattcgagacatcatcctgggtatggagatctcggcaccgtcacagcagcggcagcagatcgctgagatcgagaagcagaccaaggaacaatcgcagctgacggcaacacagactcgcactgtcaacaagcatggcgatgagatcatcacctccaccaccagcaactatgagacccagactttctcatccaagactgagtggagggtcagggccatctctgctgccaacctgcacctaaggaccaatcacatctatgtttcatctgacgacatcaaggagactggctacacctacatccttcccaagaatgtgcttaagaagttcatctgcatatctgaccttcgggcccaaattgcaggatacctatatggggtgagcccaccagataacccccaggtgaaggagatccgctgcattgtgatggtgccgcagtggggcactcaccagaccgtgcacctgcctggccagctgccccagcatgagtacctcaaggagatggaacccttaggttggatccacactcagcccaatgagtccccgcagttatcaccccaggatgtcaccacccatgccaagatcatggctgacaacccatcttgggatggcgagaagaccattatcatcacatgcagcttcacgccaggctcctgtacactgacggcctacaagctgacccccagtggctacgaatggggccgccagaacacagacaagggcaacaaccccaagggctacctgccttcacactatgagagggtgcagatgctgctgtcggaccgtttccttggcttcttcatggtccctgcccagtcctcgtggaactacaacttcatgggtgttcggcatgaccccaacatgaaatatgagctacagctggcgaaccccaaagagttctaccacgaggtgcacaggccctctcacttcctcaactttgctctcctgcaggagggggaggtttactctgcggatcgggaggacctgtatgcctgaccgtttccctgcctcctgcttcagcctcccgaggccgaagcctcagcccctccagacaggccgctgacattcagcagtttggcctctttccctctgtctgtgcttgtgttgttgacctcctgatggcttgtcatcctgaataaaatataataataaattttgtataaataggaaaaaaaaaaaaaaaaa

SEQ ID NO: 131 - DNA, 1038 bp, homo sapiens
atttgaggccatataaagtcacctgaggccctctccaccacagcccaccagtgaccacgaaggctgtgctgcttgccctgttgatggcaggcttggccctgcagccaggcactgccctgctgtgctactcctgcaaagcccaggtgagcaacgaggactgcctgcaggtggagaactgcacccagctgggggagcagtgctggaccgcgcgcatccgcgcagttggcctcctgaccgtcatcagcaaaggctgcagcttgaactgcgtggatgactcacaggactactacgtgggcaagaagaacatcacgtgctgtgacaccgacttgtgcaacgccagcggggcccatgccctgcagccggctgctgccatccttgcgctgctccctgcactcggcctgctgctctggggacccggccagctctaggctctggggggccccgctgcagcccacactgggtgtggtgccccaggcctctgtgccactcctcacacacccggcccagtgggagcctgtcctggttcctgaggcacatcctaacgcaagtctgaccatgtatgtctgcgcccctgtcccccaccctgaccctcccatggccctctccaggactcccacccggcagatcggctctattgacacagatccgcctgcagatggcccctccaaccctctctgctgctgtttccatggcccagcattctccacccttaaccctgtgctcaggcacctcttcccccaggaagccttccctgcccaccccatctatgacttgagccaggtctggtccgtggtgtcccccgcacccagcaggggacaggcactcaggagggcccggtaaaggctgagatgaagtggactgagtagaactggaggacaggagtcgacgtgagttcctgggagtctccagagatggggcctggaggcctggaggaaggggccaggcctcacattcgtggggctccctgaatggcagcctcagcacagcgtaggcccttaataaacacctgttggataagccagaaaaaaaaaaaaaaaa

SEQ ID NO: 132 - DNA, 3087 bp, homo sapiens
gcaggtgggattggatagcgacgaaggccggcaggctaggcgtggacccaactggcgaggctgctggggttgcagcgggacagttggggcggccccgcaggcccaggtgaacaaaaattgtttgctggcccccaggatactaactagacctttggcctgactcacaggacactaaggctccttttctgaagaagccttttaccagtctcatttaggggatgggaacaacatgtcttcacctagggactttagagcagagcctgtaaacgattatgagggaaatgactctgaagcagaagacttgaatttcagggagactttgccttcatcaagtcaggaaaacacacctagatcaaaggtttttgaaaataaagttaattcagagaaggtaaaactttctcttcggaatttcccacataatgattatgaggatgtttttgaagagccttcagaaagtggcagtgatcccagcatgtggacagccagaggccccttcagaagagacaggtggagcagtgaggatgaggaggctgcagggccatcacaggctctctcccctctactttctgatacgcgcaaaattgtttctgaaggagaactagatcagttggctcagattcggccattaatattcaattttcatgagcagacagccatcaaggattgtttgaaaatccttgaggaaaaaacagcagcgtatgatatcatgcaggaatttatggctttagaacttaagaatctgcctggtgagttcaactctgggaatcaaccaagcaacagagaaaaaaatagataccgagatattcttccatatgattcaacacgcgttcctcttggaaaaagcaaggactacatcaatgctagttatattagaatagtcaattgtggagaagagtatttttatatcgctactcaaggaccactgctgagcaccatagatgacttttggcaaatggtgttggaaaataattcaaatgttattgccatgataaccagagagatagaaggtggaattatcaaatgctaccattactggcccatttctctgaagaagccattggaattgaaacacttccgtgtattcctggagaactaccagatacttcaatatttcatcattcgaatgtttcaagttgtggagaagtccacgggaactagtcactctgtaaaacagttgcagttcaccaagtggccagaccatggcactcctgcctcagcagatagcttcataaaatatattcgttatgcaaggaagagccaccttacaggacccatggttgttcactgcagtgccggcataggccggacaggggtgttcctatgtgtggatgtcgtgttctgtgccatcgtaaagaactgttcattcaacatcatggatatagtggcccaaatgagagaacaacgttctggcatggttcaaacgaaggagcagtatcacttttgttacgatattgtgcttgaagttcttcggaaacttctgactttggattaagaaagacttctgttgcctctcacttgaaattaccaagtgggtttgcacctcctcataaagaacatgtttgcactgtgctgaagggctttgctatgcatacaatctgctttcttggtttatcagtttattttctttctaaaagctccctgaagggcaatatcatttggcttggggtgatcagtgtttacttattgatcttgctagacaatatcaaaataacttcccacattttccagtgaaacagatgttacataaaacgattgcagcttggctatttggttgaagggattacagagcccaataaaggatttaaaatatattcattaagattttatttggaaaggtggctggagagagctgaggatttccaggactttgtaagttcttattctgggagaacataaggccaataatcatgacctcttccaggcatttttaagacagatgtctattcatgttctttagctagagcctgtactttttgctggcatttgaataacccagtttaaaaagagtccagttagggtggactaactttggacacaaattggcttccatttcctacattttcatactgctgccttcctacagctgctagaccaagacctgttggtctgggaagcatttcatggatagggagagctcctctcggtgaacagtccaaaactaaaatagatgtttatatagaaagcccaagaggagacttttgccatgcctgagttctttcctatcccaccctaacacttaacatattacttagtctgctttgttaaaagcaagtattacctttaacttgcctcttactctttgccctttagctaactaataaagtttgatataggcattattatataattctgagtcattcatggtatctctcatgtttgatgtatttttcaaactaagatctatgatagttttttttccagagttccattaaatcatttatttcctttactttctcacctctgttgaaacatttagaaactggatttgggaacccaattttggaaaaccagattcatagtcatgaaaatggaaacttccatattctgtttttgaaaagatgtggccattattacagtaattttattataggactttgcctcgtacaattaatagtgatattttggacaaggagttctggtgacaagctatacctaattataagctataaaacaatagatatgagtgtttgtacagtttaactcaatggagatcagaatattctatgtattgagaaaatgtttaatatcaatctataaatcttgaatttctaagaggcttattttgttcttttggctgaatgagtatatttgaattggttgaataattaataattctcattgtaaaaataattatatgccaaaaatatatttgatgttaaatcaaatagatgattctgtttacattgttcatatgaataataatctgtgttaatttcattttgataattggcctttaatatttgtatctctaattttattttctctctgttactgtaaaataatagctataatgtataacaattttcttcagaagaattctatgctattattaaaataaaatatttactgtgaaaaaaaaaaaaaaaa

SEQ ID NO: 133 - DNA, 4294 bp, homo sapiens
gttacccaacaggcgccgcggctgctccggtggcgccactgactcggaggcggctgcggagagcggggcgctggcccgtggaggcggcagcggcggcggctttctagcggatccgagattatatatctttgaatgatgcaggccactgcagtggtggagacagcatctggtaaaggctaccacagtaatggaggcaacctccaaaaagataaaccttcaaatccaaagaaagaaaatttgttattatcctccaatggttgtgatgaagtcaaattgacttttcctgatgatgactggaattcttcgacactagagcaaagagctaataataaagaaatcagcaatattgacaaaatggatttattagagccatttttttcagtgagtcaagatactaacacagagagtactcagtttcagtcaagtgaacttgaagacagtactgactatgctttcttgaataaaacatattctataccttattcagagtcaaaactaaagaaggaaagtcttactcctttaagttcagaattagatcctgaagtgcagaaaaaagaggaggttttttttaatattttggaacatcaagataagactgttggcttggaaagaatctacaatatttcagatgctaattatagagaaagtgctgaagatacacaaaagcatgatacagatgaagactcacagcaggaatatcacagtgcagaagaacaagaatacataagtaaccatttatcttttgaccaaacaaaagcattagatatatctaatccagaagttgttgaattaggaaattcgggttatgaagttaaatgtgctagcaatgtagaagataatcgtgttaactcgggaagtggttctatcatctctttcgattcacttgatgtttatggacaagaagagtcacttcatgtctccaaatttcagaattctgttatgttaagagaatatcatgacctaaagcatgaaaagtataaggaacaagagactaattcaatgtaccacactgtatttgatggcagtgtactaagaagcaattctccaggaaaccaggaatctcaatctaagagtggttccttgagccctcaaaaagtattaaaaatgaaaatttatactgaaaacatgaaatctcaaataaatgaaggtaaagatttttgtggaaataaaattgttgagaacaaaatattactgcaccttgaaaatcctagcacattaccacaggataaagctttagagacattactccaaccctgtaaagattgtcaaacttcctggacctctgtttttgatgattcgataatttctgcctgtggatattatgaaagcctacaaaacactgctgactcagccttagatttttctgctatgctaccaaagatcgcagtcagagataatcaggcaatagaagataatacgtccctaaaagttgctcatagcagtaccacaaagaaaacatgctttcacaatataggagaaatgtgtactaaatcattgacagatgcagcaagttgtacagtcacaattaatcagacagtggacgttagcactgattttagggcttgtttcacaaccagcagggcaacaagtgcaagaccttctgtagtatctacatcaagcaacacagagataacaatgatgaataaaaaacgacctgatgaatggcaaaatgagaaacaaaaaagtgtggcttgtagtacagattggtcatacagtgaagattgtatagatacacagatggctataacaaaaggatcaggaaaatctctctccgttgacagtttaaaacctaatggaaattttctaaataaggatttcctggaattaagaaaagcatgtggtatcacagacctaaagaaacatcctgagagggaatttcaactttttaaagatacagagaaggatttgccatcaatgtgctgtcagaagataatgcagagagccataaaagcagagctgcaccttttaaatgttcactatcagatgtgtcgtcgccattgttgtgatatttacaaacttgtcatggaaaatagggaaggattaaatatgaatttatcaagtaattctgctaagaaggaattgggatcagcactactgtctcttttgggggacttaaaagttagatatgtgactttgaaagaaaaaatacacaaaggcataccactggaagagctgcccccactgtcactagaatcaaaattattatctaccttctctacttttgcttccaggctaatgaaaaaagaaacacatgtcttttcagaagcagatgctgaacaagataatcagagggctcatgatgttgatgtttcttcaaacctaaaaaagacactctctcaaatgtctttatcatctgacaatagtcatgctacacaaaacatatcacccaagaaagatgactttaaaaatggtgatataaatgcagactttagtcaactgaaacttggtgataaagactgcagacattaccaagagacaagcgaagactggtctgatgctaaagagagcctgacaggagttgacgtctcagggacacagggaaatcaagtagaacaagacacatggaatttggatcttacaggagaaatgaagaatgttgaaccctcacaaagagataaaggttatttgatacatgttggtggcctctgcccttcagtatctgaggccgatttaaggtctcatttccaaaaataccaagtttctgaaatttcaatttatgattctactaattacagatatgcatctcttgcttttacaaaaaacagcgatgcaaagatagctgtgaaagaaatgaatgggatagaaataaatggaaagtcagtaaatgtgtggcctgttaaaattcttggagaatatacatcaccactttcctccaaaaatgggaatagaattagttcgaataatttagagaaaagcaccaacaaacaaatccactcagaattctccatttctagattgcccagaactaggccacggcagctgggttctgagcaagacagtgaggttttcccttccgaccagggtgtcaagaagaattgtaagcagattgaatctgctaaattattacctgatacacccgttcaattcatacctccaaatacattgaaccttcgtagctttaccaagatcataaagagactggctgaactgcatccagaagtcagcagagaccatattataaatgcacttcaggaagtgagaataagacataaaggttttctgaatggcttatctattactactattgtggagatgacttcatctcttctgaaaaactctgcttccagttaggaattcaaaaaacaataaagagaacttccttggaaagtgtgtttcctccttcagagaatgttctacagcacttaggaaaaagtagtaataacaagatgatgtaattaaataggctctataaatgggctaagctgttaaaatattctactttatatccctcctttaaaatctagcaacagttgtctatacaatattaagatcttctctatatatttaaagttaaaatataatttttaataagtttttaaatttttttatttcaattttgttacttagaacattaagatgcatatttgtgatctaaagaaattgtcttgtccattttaaaaacctttattaagtcacttttaaaatgtattgaccaagaaggaggtttgttgttacatcaatgtttgtgaaatgatttccatacataaaaaatgtaatttacctgaactttgtcttaagactcttacattggattataggataacagataaataaactgtatagatacattcagtatcatacaacattttggaatgtgtatgctttcaggcttccaagataattaaattactgtcatgatacatttcatgcattttttatgacttcagtataaaacattcaggtgtgttagccttccctgggaagggtaaacttgtatgtgctttggtaaagtacttaaattccaatgttccctatagtgcttgcattcattttgtgaaaagttttgttgtattgttagaacaattttcaaaggctgattttatgccttatctgatagaaatatagaatagatagttctttaattgcttactttttaaaagtaatataatatttaagttgcatttttattaatagtaagattaacatttaagtctgcattttctttaaatgttttaaatgtttatagcattcaatgtgtagttggatttacttgactaaaaattagccctttaacgtttatatttgttgtatttatatttaataaaggcatctaatctttagtaaaaaaaaaaas

SEQ ID NO: 134 - DNA, 1895 bp, homo sapiens
agctccagctgtccctcccgcagttggccctgtggtgttccgaagccggttacgtacggcctgagggccaggcgaacctcaggctctttgtcctactaaaaagcgcagcacaatggtagaagcagatcatcctggcaagcttttcattggtggcctcaatagagaaaccaatgagaagatgcttaaagcagtatttgggaaacatggtcccatatcagaagttcttttgataaaggatcgaaccagcaaatccagaggctttgcatttattacttttgagaaccctgcagatgctaagaatgctgcgaaagatatgaatggaacgtctttgcatggaaaagcaataaaagtagaacaagccaagaaaccatcttttcaaagtggtggtaggcggagaccaccagcttcttcgagaaacagaagcccttcaggaagtctgagatctgcaagaggaagcagtggaggaacaagagggtggcttccctcacatgaagggcacctggatgatggtggatacactcctgatctcaagatgagttattctaggggactcattccagttaaaagaggtccatcttcaagaagtggaggtcctcctccgaaaaaatctgctccttctgctgtggcaagaagcaatagttggatgggaagccaaggtcccatgtcacaaagaagagagaattatggagttcctccacgcagagcgacaatatcttcctggagaaatgatcgcatgtcaacaagacatgatggttatgcaactaacgatggaaatcatccaagttgccaagaaacgagggattatgctccaccatctagaggctatgcataccgtgataatggtcattctaatcgggatgaacattcctctagaggatatagaaatcatcgaagttcccgagaaactagggattatgctccaccatctagaggccatgcataccgtgattatggtcattctcgtcgggatgaaagttattctagaggatacagaaatcatcgaagttcccgagaaactagggagtatgctccaccatctagaggccatggataccgtgattatggtcattctcgtcgacatgaaagttattctagaggatatagaaatcatccaagttcccgagaaaccagggattatgctccaccacatagagactatgcataccgtgattatggtcattctagttgggatgaacattcctctagaggatatagttatcatgatggctacggtgaggcccttggtagagatcattctgaacatctaagtggaagttcttatagagatgcacttcagaggtacgggacctctcatggtgcaccacctgcaagagggcctcggatgtcttatggtggaagcacctgccacgcatatagtaatacacgagatagatatggcagaagttgggagagttactcgagctgtggtgattttcattattgtgatcgtgagcatgtttgcagaaaagaccaaaggaatccgccttctctgggtagggtgctccctgatcctcgtgaagcatatggtagctcaagttatgtggcatctatagtagatggtggggagagtcgatctgaaaaaggagactcgagcagatattaaagcaagcattgaaaataatagttattgcataccaatccttgtttgcaaatcaaaaattgaaatgttatttctgcattgttacctgcatattactgaaagaaacatgttggttttgtggagagaggtagatactaacttcctccatgaattttttgaggtattcaaaggaaaaggaattgttttcaaagtaatttcatacttgttgatgctatttgaaaagtgtttagatgtaatatctaccttaaaattttcacaataaaattttacatgtactgcaaaaaaaaaaaaaaaa

SEQ ID NO: 135 - DNA, 2707 bp, homo sapiens
gggctcgaggcgttcggctgaggaagggagcgcacgccggcggcgcggaggccggctctgcgcttcgggccgccccctccccccaccccgctcacacccggcacttacttcggctgtctccgctgccctccagcggagacgcagctcctcaggcgcccggcggtatttgttgggtcggcggcgtcagggattcgcagtggcctgtggtcggcgtcgtccggccactggtgcgcccccgcggcaggcagagctcacgctcctgtcccccggctggtccggggtctgggcgccgcgtcgacggcggctccgcaggacgcgcagaccgggccgcagcccattccccgagcggactgcattatgaggcacctgccttacttctgccggggtcaagtggtgcggggcttcggccgcggctccaagcagctgggcatccccacagctaattttcctgagcaagtggtagataatcttccagctgatatatccactggtatttactatggttgggccagtgttggaagtggagatgtccataagatggtggtgagcataggatggaacccatattacaagaatacgaagaagtctatggaaacacatatcatgcataccttcaaagaggacttctatggggaaatcctcaatgtggccattgttggctacctgagaccagaaaagaactttgattctttagagtcacttatttcagcaattcaaggtgatattgaagaagctaagaaacgactagagttaccagaacatttgaaaatcaaagaagacaatttcttccaggtttctaaaagcaaaataatgaatggccactgatgaaaaattgtattatttattcattcactgttttctagtgtttctgtgtttattactgttcagcatcatcttggttatatactgaaaatcaaacactttactacagttgtgaattagtttaaaccgtacaatgttgttatcatatcatgcttcaactattaaattaagcccatcatatcatagcactaaaaagattgagttaaaaataagatttaaaaaatatatattgattaaaatgtaccactagaaaggtattacatgtgtataagtatgggtaaaaaggcaagtcactagtttgagatgaaaactaaaattttcatggtaaaatgccagcatgtatgtacttgtgtagtgtgtacttctaaacagagaaggcttataaaagtaaatgcattaaggccaagtgcagtggctcacaccggtaatcccagcactttgggaggccgaggtgggaggattgcttgagctcatgagttcaagaccagcctgggcaacatagcgagactccatctctataaataaaaaaaaaggaaatgcattaaatagaaggttgatagtttatcataaacctgcggggaagaaactcagactttctatttttgatattttgtgcattaatacattacaaacatgaagatgtttgtaaagttttgttttagtcattttctttgcagtcacatcattgtaccaccttcattattgtatagagctgcttcaattctgagtcctctggacttcccctgcctatctgtttgttgttgttgttgaagacagtaaaataagtgttttcaaatctatatgtctcctttttgttggataatgtttcttctttttaatggtaaatattcttgttcttcaacatttttctttggttcttttttccttttttaggaaaaacaaaacaacagacttcatccttaggttttctcaagatttaagtgaacacatttacacatatcaatttcttaaagaacacaaaatgtttcctccctagcaaaactatttaagagccaattaaactatgaaatagttataaaattatttttaatatttaaggccttgaaattatattccaaggcaaatctaaatgggtgtagttgtatatgcacgatgtaatttaatgctaaagagtacttacagcttgagggaaaagcataaagttttagttaaatagccttcatactgtggatttttcctcctactaactaatatgtgggaaattaagattacagatgctttgggccccctcaaacagtacattgctacagttcactgtagcaacagatttggtggtgatggggggatagaggtagaagcagatagaaggtaattttaaagttaatttattatgaatcattttcccctaatctgcataaatgaattagaactgattttaataaaaatattctgtgtaaaaagtactcagaaaaacatctaaagctgttggagaagagggactcatataaatagttggattgcgttttgctttttatttctttataaaaatatgtcaaaaacagtttttaattttagaaatcttatacttgaaagaaacctcaattatcagtggctttatgaagtaaagttaaaaacaaacataggaaatgtgaaaatatttgtgtttgttttgtctgactaacttgctgctaaatgctatctttaggtgtgtgaaagttctttgatatgttattgtccttttacatcttgttaaatagccattgcttttgagaatcagatagtgtgttgtttaggggttaattgtgtctatatctttcaaaaacttttatattatgtattataagaagttacagtagtaccattttgattagtctgaatgttttcaggccttgaaataaattttgactaagtgatattttttctt

SEQ ID NO: 136 - DNA, 5796 bp, homo sapiens
ccagccacctgacccaaatacaccacctgaacccacgaccaggtatgcccacaccccatgggtggccttaacacacacaccctgcccctttctccaagtacaggagcagcagcccagacttccctcggggcaccgcggcctgcttgggactgcacagtgcctgggagggtgcctggggagggtcacaagggacttggtgctagaagcaggaaaagtgtagggaccggaaaagcccccgtgcatcctggaagggacatgggccagtttgagcaggggtgtgggagtccagccctggccttgccaggtggagaggcgcctgggccagacatccgcggcaggaggcgggggaacatgccaagaggcggaaggggcacgcggagacccccagggggcgccggaaggggcgcgccgggcggtcggcggcggccgttggcgagctgaggcctgccaggcgaagtctggagaccagccgggccgcggccgcaatggccaaggactcgcccagccccttgggcgcgtcgcccaagaagccgggctgctccagcccggcggcggcagtgctggagaaccagaggcgggagctggagaagctacgggcggagctggaggcggagcgggcaggctggcgggcggaacggcggcgcttcgctgcccgggagcgccagctgcgtgaggaggccgagcgggagcggcgacagctggctgaccgtctgcgctccaagtgggaggcacagcgcagccgggagttgcggcagctgcaagaggagatgcagcgggaacgcgaggccgagatccggcagctgctgcgctggaaggaggccgagcagcggcagctgcagcagctgctgcaccgggagcgcgatggcgtggtgcgccaagcccgggagctgcagcgccagctggccgaggagctggtgaaccgcggccactgtagccgcccgggggcgtccgaggtttccgcggcgcagtgccgctgtcgcctgcaggaagtgttggcgcagcttcgctggcagactgacggcgagcaggcggcgcgcatccgctatctgcaggcggcgctggaggtggagcgccagctcttcctcaagtacatcctggcgcacttccgcgggcacccggctttgtcgggatcaccggacccccaagctgtgcattccttggaagaaccgctgccccagacctccagcggctcttgccacgcccccaaacccgcctgccaactcggatctctagacagcctgagtgctgaagtcggtgtgcgctcccgctcgctaggcctggtgtcctctgcgtgctccagctccccagacggcctgctctccacgcacgccagctcccttgattgcttcgcacctgcgtgttcccgctcgcttgacagcacccggagcctccccaaggcctccaaatccgaggagcggccctcctcaccagacacctccacccctggctcccggaggctctcgccgccaccatcgccactcccgccgccaccaccaccgtcagcccacaggaaactcagcaacccgcggggaggagaaggctctgagagccagccctgcgaagtcctgactccctcacccccgggcctgggccaccacgagctgataaagctgaactggctgctggccaaggcgttgtgggtgctggcgcgccgctgttataccctgcaagcggagaacaagcagctgcggcgtgcaggctgcccctaccaggcagacgagaaggtgaagcggctcaaggtaaagcgcgcggagctgaccgggctcgcgcggcgcctagctgaccgcgcccgcaagctgcaggagaccaacctccgggccgtgagcgcgcctatacccggcgagagttgcgccggcctggagctgtgccaagtctttgcccgccagcgcgctcgggacctgtcggagcaggcgagcgcgccgctggccaaggacaagcagatcgaagagctgcggcaggagtgccacctcctgcaggcgcgtgtcgcctcgggtccctgcagcgacctgcatactggaaggggcggcccctgcacccagtggctcaacgtcagagacttagaccgcctgcagcgcgagtcccagcgggaagtgctgcgcctgcagaggcagttgatgcttcagcagggcaacggtggcgcttggcccgaggcgggcggccagagcgcaacctgcgaggaggtgcgacggcagatgctggcgctggagcgcgagctggaccagcggcggcgcgagtgccaggagctgggcgcgcaggcggccccggcgcggcgacgtggcgaggaggccgagacacagctgcaggcggcgctgctcaaaaacgcctggctggcggaggagaatgggcggctgcaggccaagaccgactgggtgcggaaggtggaggctgagaatagcgaagtgcgcggccacctgggccgcgcgtgtcaagagcgcgatgcctccggcttgatcgccgaacagctgctgcagcaggcggcgcgcgggcaggacaggcagcagcagctgcaacgcgacccgcagaaggccctgtgtgacctccatccttcctggaaggagatacaggcgctccagtgtcggcctggtcaccctcctgaacagccctgggagaccagtcaaatgccggagtcccaagttaaaggtagcagaaggcccaagttccacgcacggcctgaagactacgcagtgtcacagcccaacagagacatacaggagaaaagggaagcctccctcgaggagagcccagttgcccttggggagtcagccagtgtcccccaagtttcagagacagtccctgccagccaacctctgtccaagaaaaccagctcccagtcaaactcctcctctgaggggtcgatgtgggccaccgtgccgtcctcccctactctggacagggacacagccagtgaggtggatgacctggagcctgacagcgtgtccctggccctggaaatggggggctcggcggctcctgctgcccccaagctcaagatcttcatggctcagtataactacaacccatttgaggggcccaatgatcaccctgagggtgagctgcccctcacagctggggactacatatatatcttcggggacatggatgaggatggcttctatgagggggagcttgaggatggccggcgggggctggtgccctccaacttcgtggagcagattccggacagctacatcccaggctgcctgcctgccaaatcccctgatcttggccccagtcaactcccagcggggcaggatgaagctctggaggaagacagcttattatctgggaaagcccagggagtggtggacagagggctgtgccagatggtcagggtgggctccaagacagaagtagcaacagagatcctggataccaagacggaagcctgccagctgggcttgctgcagagcatggggaagcagggcctctccagaccccttctggggaccaaaggggtgctccgtatggctcccatgcagctacacctgcagaatgtcacagccacatcagccaacatcacctgggtctacagcagccaccgccacccccatgtggtatatcttgatgaccgagagcatgccctgaccccagcgggcgtgagctgctacaccttccagggcctgtgccccggcacgcactaccgggcgcgggtggaggtgcggctgccacgggacttgctgcaggtgtattggggaactatgtcctccaccgtcaccttcgacacactcttggcaggacctccctacccaccgctggatgtgctggtggagcgccatgcctcgccaggtgtcctggtggtcagctggctccctgtgaccattgactcagctgggtcctccaatggagtccaggtcaccggttatgctgtgtatgcagatgggcttaaggtttgtgaggtcgccgatgccactgctgggagcaccctattggaattctcccagctacaggtgcccctcacgtggcagaaggtctcagtgagaaccatgtcactctgtggtgagtccctggattcagtgcctgctcagatccccgaggacttcttcatgtgtcaccgatggccagagactccaccctttagctacacttgtggcgacccatccacctacagagtcaccttccccgtctgcccccagaagctgtcactggctcctccgagtgccaaggccagcccccacaaccctggaagctgcggggagccccaggccaagttcctagaagcattctttgaagaacccccaaggaggcaatccccagtgtccaacctgggctcagaaggagaatgtccgagttcaggggctggcagccaagcccaggagcttgcagaggcctgggagggctgtagaaaggacctgctctttcagaagagtccccagaaccacaggccaccttcagtcagtgaccagcctggggagaaggaaaattgctcccagcacatgggcaccagcaaaagccctgctccaggattcatccatctacgcaccgagtgtgggcccaggaaagaaccgtgtcaggaaaaggctgcccttgagagggtacttcggcaaaagcaagatgcccaagggttcacacctccccagctgggcgccagccaacagtatgcatctgacttccataacgttttgaaggaggagcaggaggcactgtgcttggatctgtggggcacagagaggcgagaggagaggagggagcctgagccccacagcaggcaaggacaagctctgggggtgaagagagggtgccagctccatgagcccagctcggcactgtgtccagctccatccgccaaagtcatcaagatgcccaggggtggcccccaacagctggggacgggggccaacactccagccagggtctttgtggccctctctgattacaaccccctggtgatgtctgccaacctcaaggctgcagaggaggagctggtcttccagaaaaggcagttgctaagagtgtggggctctcaggacacccatgatttctacctcagcgagtgcaacaggcaagtgggcaatatccccgggcgcctagtggctgagatggaggtggggacagagcagactgataggaggtggcgttctccggcccaagggaacctgccttctgtggcccacctcgaggactttcaggggctcaccatcccccagggttcctccctggtgctccaggggaactccaagagactcccactgtggactccaaagatcatgatagcagctctggactatgatcctggggatgggcaaatggggggccaggggaagggcaggctggcgctgagggcaggagacgtggtcatggtttacgggcccatggatgaccaaggattctattatggagagttgggcggccacaggggcctggttcctgcccacctgctggatcacatgtccctccatggacactgagcaagcatccttgcccaggtagtggcctctggctgctcacaccctgccagaggagaagcaagcgttcagaccctcacaccagcacccctcctcaccaccataagtagcatgtgctccaagtgccactgtgttaaactgatggtagtccttaagcgtcccctaggctctgaaagtagcaggacttaagcctgagttatttgcaaaagcaaacacaacaagccaacccctgagagtctgagaagccatttcaaagttgctgataactatggcaggtatacggagaagcgcctttttctgtggccaatgtgtgttttctctgggaggttaaggttatctgtccattgccttgtacgaaagtctcaagaaaagtctacatcttaaaaaagaaaaa

SEQ ID NO: 137 - DNA, 1869 bp, homo sapiens
tacctggttgatcctgccagtagcatatgcttgtctcaaagattaagccatgcatgtctgagtacgcacggccggtacagtgaaactgcgaatggctcattaaatcagttatggttcctttggtcgctcgctcctctcctacttggataactgtggtaattctagagctaatacatgccgacgggcgctgacccccttcgcgggggggatgcgtgcatttatcagatcaaaaccaacccggtcagcccctctccggccccggccggggggcgggcgccggcggctttggtgactctagataacctcgggccgatcgcacgccccccgtggcggcgacgacccattcgaacgtctgccctatcaactttcgatggtagtcgccgtgcctaccatggtgaccacgggtgacggggaatcagggttcgattccggagagggagcctgagaaacggctaccacatccaaggaaggcagcaggcgcgcaaattacccactcccgacccggggaggtagtgacgaaaaataacaatacaggactctttcgaggccctgtaattggaatgagtccactttaaatcctttaacgaggatccattggagggcaagtctggtgccagcagccgcggtaattccagctccaatagcgtatattaaagttgctgcagttaaaaagctcgtagttggatcttgggagcgggcgggcggtccgccgcgaggcgagccaccgcccgtccccgccccttgcctctcggcgccccctcgatgctcttagctgagtgtcccgcggggcccgaagcgtttactttgaaaaaattagagtgttcaaagcaggcccgagccgcctggataccgcagctaggaataatggaataggaccgcggttctattttgttggttttcggaactgaggccatgattaagagggacggccgggggcattcgtattgcgccgctagaggtgaaattcttggaccggcgcaagacggaccagagcgaaagcatttgccaagaatgttttcattaatcaagaacgaaagtcggaggttcgaagacgatcagataccgtcgtagttccgaccataaacgatgccgaccggcgatgcggcggcgttattcccatgacccgccgggcagcttccgggaaaccaaagtctttgggttccggggggagtatggttgcaaagctgaaacttaaaggaattgacggaagggcaccaccaggagtggagcctgcggcttaatttgactcaacacgggaaacctcacccggcccggacacggacaggattgacagattgatagctctttctcgattccgtgggtggtggtgcatggccgttcttagttggtggagcgatttgtctggttaattccgataacgaacgagactctggcatgctaactagttacgcgacccccgagcggtcggcgtcccccaacttcttagagggacaagtggcgttcagccacccgagattgagcaataacaggtctgtgatgcccttagatgtccggggctgcacgcgcgctacactgactggctcagcgtgtgcctaccctacgccggcaggcgcgggtaacccgttgaaccccattcgtgatggggatcggggattgcaattattccccatgaacgaggaattcccagtaagtgcgggtcataagcttgcgttgattaagtccctgccctttgtacacaccgcccgtcgctactaccgattggatggtttagtgaggccctcggatcggccccgccggggtcggcccacggccctggcggagcgctgagaagacggtcgaacttgactatctagaggaagtaaaagtcgtaacaaggtttccgtaggtgaacctgcggaaggatcatta

SEQ ID NO: 138 - DNA, 121 bp, homo sapiens
gtctacggccataccaccctgaacgcgcccgatctcgtctgatctcggaagctaagcagggtcgggcctggttagtacttggatgggagaccgcctgggaataccgggtgctgtaggcttt

SEQ ID NO: 139 - DNA, 332 bp, homo sapiens
ggatgtgagggcgatctggctgcgacatctgtcaccccattgatcgccagggttgattcggctgatctggctggctaggcgggtgtccccttcctccctcaccgctccatgtgcgtccctcccgaagctgcgcgctcggtcgaagaggacgaccatccccgatagaggaggaccggtcttcggtcaagggtatacgagtagctgcgctcccctgctagaacctccaaacaagctctcaaggtccatttgtaggagaacgtagggtagtcaagcttccaagactccagacacatccaaatgaggcgctgcatgtggcagtctgcctttctttt

SEQ ID NO: 140 - DNA, 299 bp, homo sapiens
gccgggcgcggtggcgcgtgcctgtagtcccagctactcgggaggctgaggctggaggatcgcttgagtccaggagttctgggctgtagtgcgctatgccgatcgggtgtccgcactaagttcggcatcaatatggtgacctcccgggagcgggggaccaccaggttgcctaaggaggggtgaaccggcccaggtcggaaacggagcaggtcaaaactcccgtgctgatcagtagtgggatcgcgcctgtgaatagccactgcactccagcctgggcaacatagcgagaccccgtctct

SEQ ID NO: 141 - DNA, 1805 bp, homo sapiens
tgacgcccccttctcggccgccagccctccacacctcatctgccttgctccacctccctagtgcacccgctccagccccgtctgcccaggagggcgcttggatttccttctccgcggcgcgtatctaacccttcctgcatgtatttcactgcaggctgaagaaagctcagtctcaattgtgtttcctgcctgtcagcctcttgcctcctaaacgtgtaccatttccacttgatgtcatcacgcagaaggggtgaaagagactcggtgacagatacagaaatgaacacacctgtgagtactggatgcctgtgagcttgccattacctgcactgcaaagacacagggcggtggcctctgagaagcagctccttccccttcaccttggccttgcccttcctgctcacggtccaccatggagacgctgtcccaggactctctgctggaatgtcagatctgtttcaattactacagcccccggcgcaggcccaagttgctggactgcaagcacacctgctgttcagtgtgcctgcagcagatgaggaccagccagaaggatgtgcggtgcccctggtgccgcggtgtcaccaagctgcctcccggcttctccgtgtcgcagctcccggacgacccggaggtcctggctgtcatcgccattccacacacttccgaacacaccccggtcttcatcaaacttcccagcaatgggtgctacatgctgcccctgcccatctccaaggagcgtgcgctgctgcccggagacatgggctgccgcctgctgcccgggagccagcagaagtccgtcaccgtggtgaccatccctgctgaacagcagcctctgcaaggtggggctccccaggaggcggtggaggaggagcaggacaggcggggcgtggtgaaaagctccacctggtcgggggtgtgcactgtcatcttggtggcttgcgtcttggtcttcctcctcggcatcgtgcttcacaacatgtcttgcatttctaagcgcttcactgtgatatcctgtggctgaagagggctgcagggaagtctcttgtgggtgccaacttaggggttgagcaggttgatgatgagatcccagtgagaagatggggggcaacactgaccatttggtgctgagcgctggcctctgggttgcctcttgattaccccaagacagacacaaagggcagaaggtgcggtctcaacaagataccaggtgaattgttctgagtgttgatggcaacagcttggaagatgattgcatgcatcctcataatcatgtattcaatggactgtaatttatgatttttcaaaatcatgttacaagatagacatattctacttagacgttaaactgtacaagtgcgtacaatgtgaccttctctaaatgcggtagattcaaacaaagatgctctgtagacaagtagaattaaacctgcgaatccgtgtaaaaattcagtgaagacatgcactgctggcttctttattttttttttctttttattgaaacccagtcttcatttagttgctaaggcttttaatacattttgaatggcaccaaaacaaaataagtcaaaatggacagtcattttatttggaggaaatatttgaacaagtgtctccaatgtgttgtgttttgtcatgaaccttcattttcttcacttgtaattagagcttgctacgtgtttatggaactgaaagctcaacaggggagcaataaaccgagaaatcatgagaaatgtctaatcccatgggaaaacctgtatgccgattttcctcaagccatctcacaaaataagaatttcaaatgt

SEQ ID NO: 142 - DNA, 3050 bp, homo sapiens
aagtccctccgagaggggcggctccgcgtcatgtgactggagtccgcgtaggaggggtcggaggtcttacccaacagattgacgcggcgttagtattggccgtgtacccgaaaaactgattgactgggctggcgttaactgtgcggaggcaggatttccctggggaaagtcttcactcagagcttcgctgacagccaaggatggcaagcaaggggccctcggcctctgcatctcctgagaactccagtgcaggggggcccagtgggagcagcaatggcgctggcgagagcggagggcaggacagcactttcgagtgcaacatctgcttggacacagccaaggatgccgtcatcagcctgtgtggccacctcttctgttggccgtgtttacatcagggatttcaaggatttggatttggagatggtggcttccagatgtcttttggaattggggcatttccctttgggatatttgccacagcatttaatataaatgatgggcggcctcctccagctgtccctgggacaccccagtatgtggacgagcagttcctgtcacgcctcttcctatttgtggccctggtgatcatgttctggctcctgattgcctaatgctgggctcctgcctacatccgtggcagggctctggactggtgacgtgccaccccaactcctggtgtttggcttcctggctaatcttgactcctggaatcagtgggatcagtaacacatcaaggagtcttgtttcttcatcagagctttggaactcgagaccagttggcgatgacccctgaatatcgccaccgctgtaaacactctataacttcaggccttggcattgagtcatctctcatgggtgacaccatgaaatcttgtttcagccagttctgcaggtcctgactctgcagagggaagaggcagaaagagagaaactgtcagagtataatttcacctgagtttaatattacagaaacaaagggatgcaccaaatggtatttctggaaattttcatgtctttaaataccccttggtaagttgcttctgaagccagtgggggctcctcagatagagaggttcccctttcaaatcccagtgccgctctgttctctttccttcccctcccactccccctcttcttcctctgtagagatgcaagaaattgctgtcccataaaaatcataattgcagtagctaaagctggggtcacttcgtgaattcaccagagactcaaagatcttttattggctctgggctgtgctcagtgtctttggcctcagagaacaacttgaatgacttcctggtttcctggcataaattattcctggtgagacatgtggcttaactcacaggtttcccatcagctttctccctaaaactatgttcatctgcctctctctgccagagaacatacagccgagaatactgccgaagctgagactgactactgtgcattaggaaagacctggagtcaggactttggtgggatttggagctccgaggcagtaataactgaacaagcagccctgtcccctaggctgcagaagcttgaatgcatcctctcccagaacctgccacaggaaactgggggctttgtcaggtcagcccaactgcatgcaaaagaccaccatcctcagaagccaagttgtcttttatgaagaggcaaggaaaggggaaacccacatgtgaccctgattttggtatggcttgatagagttccctgaaaactccttgtatgtgtgctaaaaccagggaagcatgtgactgccaagcaggcaacccctgatgatttgtaaagccaggtggcagggccttggggagccccagcacaatgatattgtgtggtcttccctcctgtggaatcgaggggaaattattcttcccaataccttgatttgattttcagtttcataagcttcttcctctgaatcttattgagggactatggtaccaagcaggtaggactgttcacctggtggaacagttcttgctctgccttctaggcttcatcccagaaatccagcctctttctggagaccccaaagctggagggagatgggctttcctctgggcctctctcctactttgccatccacactgctcctggctaaccccagcaataaccaacaaatggtaggaagccccatctattgctttttctcaattatgactgcatagtttatggaaacaaagatcttgaggaagatgagggaagccctcccctcttcacagtccccatctcttctcctttgtacctgtcaacaccagagttcagtgtttaaacagacaaaatataaagtattgagtaggtggttcatatgccgaatccacttggtaggaagaaaccaccagctttatagtgtgcctgatagattttaaacattcctgggcacccactcaagagtgctctttttatcaccttctggaaatccgcaaagttgcaggggcctctggagtgtctcttctctagagagaattggtgggacccccctcagtgcagtggccccaactagtggagggagagaggacttaagtcagatggactcaacagaaatgggtttccagaagaataatgaaaagttgtgggtaggaaaatgaatcatttggactcttcaatgaaatggagtgagcccaggagagctcagccaacagaggcactctgggaacctgttagtaaagccaggctggccaaatgccatttgattttgaacctcgtaggtccccactcaccctctgccaggagctaagtaaggcaggagagctgacttgggactcctggctcggccccaacagggagcccccttcccaccatccctcggcaagctcaccacctcatccttctgccaaggcagctttcctttcttttgtgtgttttctgtgttcttagcctccaccctcctcctgccacccttgtggactaggaccaggtcctgaccccagtcagaaaatgatgatatgtacagtggcacaccttaaccagtcactaattttcactgttgtgaaagtgatttgatttagaattaaacaaatggttttacattactatgaaaaaaa

SEQ ID NO: 143 - DNA, 2117 bp, homo sapiens
ggaggtgtcgaggccgtggcccggaagtggtcggggccgctgcggacggaagggcgcctgtgcttcgtccgctcggcggtggcccagccaggcccgcgggactcagaccagcggggagcgcggcctccgcccttggggccctcccgccgggccggagacccaagcccccaacgccaggccctgccctggaagcgctcgcggcccggcgcctggacgggggagttgctgctctttggcgtaaattgcaatcgattagggatcgtttctcagaatcaagttagaagtgagagttcagataagtgaggccgccattgctgctttgaacacctcagaaggggagaatggatttatcaggagtgaaaaagaagagcttgctaggagtcaaagaaaataataaaaagtccagcactagggctccttcacctaccaaacgcaaagaccgctcagatgagaagtccaaggatcgctcaaaagataaaggggccaccaaggagtcgagtgagaaggatcgcggccgggacaaaacccgaaagaggcgcagcgcttccagtggtagcagcagtaccaggtctcggtccagctcgacttccagctcaggctccagcaccagcactggctcaagcagtggctccagctcttcctcagcatccagccgctcaggaagctccagcacctcccgcagctccagctctagcagctcttctggctctccaagtccttctcggcgcagacacgacaacaggaggcgctcccgctccaaatccaaaccacctaaaagagatgaaaaggagaggaaaaggcggagcccatctcctaagcccaccaaagtgcacattgggagactcacccggaatgtgacaaaggatcacatcatggagatattttccacctatgggaaaattaaaatgattgacatgcccgtggaaaggatgcatccccatctgtccaaaggctatgcgtacgtagagtttgagaatccagatgaagccgagaaggcgctgaagcacatggatggaggacaaattgatggccaggagatcactgccaccgccgtgctggccccctggcctaggccaccccccaggagattcagccctcccaggagaatgttgccaccaccgcctatgtggcgcaggtctcccccacggatgaggagaaggtcccgctccccgaggcgcaggtcccccgtgcgccggagatcacggtccccgggccgccgccgccacaggagccgctccagctccaactcctcccgataaacaggccactgaagctctcgcccctgtaacttataccccacccagctcagttttgtcacttttctagccaaaggaagaccagtaggaaagcaaacccttgactctggcaggatttgcaggcagcaggcagcacccctctgccagccgggccccggctgcagaagtgctgttggtttggatgctgtgtgcctgtcaagattccctccggttttctggctagaaagctcatccgtttccggtttctaagagtcagttcagtggcagagccaccagggaaaagtgaggctcttgggggtggtttgaccctgcttacctgggagcacacttttcccttccccgatgacctgggatggtggccaggccgtgcccttgctgttgctgggcagtgtccttttggaaagggagctgccccaggctttagtgcagctgccaaccctgttaggcctggcctctcgaggcctcttctgacctcaagggtcacaccccctcaaagatcctctcacccatggtagttgctgctcgtggttctgtctgtccgtgcaccgatgcacacaccgcaccccaccactgtactctgaaattggcgagtgagtggagagccagctctgcggagtcatcacgcagccatggttgtgcctgccgttcatggtggtctttcaggttatcttggcaacatgtacattgcttttattttttttcttttttgctttcattgtacagtcagtactataaaatttctcttttgagttttatacctttgtagcattttagatgacattgtgtttgtactttgttgtgtagagtggaagaattgtgttgaataaacccaagatcggaatgcaaatctaaaaaaaaaaa

SEQ ID NO: 144 - DNA, 135 bp, homo sapiens
aaaaagggcttctgtcgtgagtggcacacgtagggcaactcgattgctctgcgtgcggaatcgacatcaagagatttcggaagcataattttttggtatttgggcagctggtgatcgttggtcccggcgcccttt

SEQ ID NO: 145 - DNA, 164 bp, homo sapiens
atacttacctggcaggggagataccatgatcacgaaggtggttttcccagggcgaggcttatccattgcactccggatgtgctgacccctgcgatttccccaaatgtgggaaactcgactgcataatttgtggtagtgggggactgcgttcgcgctttcccctg

SEQ ID NO: 146 - DNA, 188 bp, homo sapiens
atcgcttctcggccttttggctaagatcaagtgtagtatctgttcttatcagtttaatatctgatacgtcctctatccgaggacaatatattaaatggatttttggagcagggagatggaataggagcttgctccgtccactccacgcatcgacctggtattgcagtacctccaggaacggtgcaccc

SEQ ID NO: 147 - DNA, 141 bp, homo sapiens
agctttgcgcagtggcagtatcgtagccaatgaggtttatccgaggcgcgattattgctaattgaaaacttttcccaataccccgccatgacgacttgaaatatagtcggcattggcaatttttgacagtctctacggaga

SEQ ID NO: 148 - DNA, 116 bp, homo sapiens
atctctggtttctcttcataacgaataaatctttcgccttttactaaagatttccgtggagaaaaacaactatgagtttatggttaaattttttgaagtcttgcctaggcaaggct

SEQ ID NO: 149 - DNA, 107 bp, homo sapiens
gtgctcgcttcggcagcacatatactaaaattggaacgatacagagaagattagcatggcccctgcgcaaggatgacacgcaaattcgtgaagcgttccatattttt

SEQ ID NO: 150 - DNA, 113 bp, homo sapiens
ggctggtccgaaggtagtgagttatctcaattgattgttcacagtcagttacagatcgaactccttgttctactctttccccccttctcactactgcacttgactagtctttt

SEQ ID NO: 151 - DNA, 2201 bp, homo sapiens
tagtttcctgtttccggcttcgcttcggcccacccccacgtccaccccgaatccctgcttaaaggccttgctttcttgtctaacgccgcaaccagtcctctgagttgccaacgtctttcttcttgtctcgacgccccgtcgtccggccacagcgattctctgcttagcaggatcggtccacagcgggacgtgagtccctttcctcctcgcggcttaccgcctctctccgcctagtgccaggtgctaataaagttgttgtttcaaatgcggccaggaacatcgcgagcggggaccaatcagagagtagctttgcctctataacggcgcgagagtgagacgtcatcggtgagcgactaacgctagaaacagtggtgcgcggagaggagaggcctcgggatgtctctggcagatgagctcttagctgatctcgaagaggcagcagaagaggaggaaggaggaagctatggggaggaagaagaggagccagcgatcgaggatgtgcaggaggagacacagctggatctttccggggattcagtcaagaccatcgccaagctatgggatagtaagatgtttgctgagattatgatgaagattgaggagtatatcagcaagcaagccaaagcttcagaagtgatgggaccagtggaggccgcgcctgaataccgcgtcatcgtggatgccaacaacctgaccgtggagatcgaaaacgagctgaacatcatccataagttcatccgggataagtactcaaagagattccctgaactggagtccttggtccccaatgcactggattacatccgcacggtcaaggagctgggcaacagcctggacaagtgcaagaacaatgagaacctgcagcagatcctcaccaatgccaccatcatggtcgtcagcgtcaccgcctccaccacccaggggcagcagctgtcggaggaggagctggagcggctggaggaggcctgcgacatggcgctggagctgaacgcctccaagcaccgcatctacgagtatgtggagtcccggatgtccttcatcgcacccaacctgtccatcattatcggggcatccacggccgccaagatcatgggtgtggccggcggcctgaccaacctctccaagatgcccgcctgcaacatcatgctgctcggggcccagcgcaagacgctgtcgggcttctcgtctacctcagtgctgccccacaccggctacatctaccacagtgacatcgtgcagtccctgccaccggatctgcggcggaaagcggcccggctggtggccgccaagtgcacactggcagcccgtgtggacagtttccacgagagcacagaagggaaggtgggctacgaactgaaggatgagatcgagcgcaaattcgacaagtggcaggagccgccgcctgtgaagcaggtgaagccgctgcctgcgcccctggatggacagcggaagaagcgaggcggccgcaggtaccgcaagatgaaggagcggctggggctgacggagatccggaagcaggccaaccgtatgagcttcggagagatcgaggaggacgcctaccaggaggacctgggattcagcctgggccacctgggcaagtcgggcagtgggcgtgtgcggcagacacaggtaaacgaggccaccaaggccaggatctccaagacgctgcagcggaccctgcagaagcagagcgtcgtatatggcgggaagtccaccatccgcgaccgctcctcgggcacggcctccagcgtggccttcaccccactccagggcctggagattgtgaacccacaggcggcagagaagaaggtggctgaggccaaccagaagtatttctccagcatggctgagttcctcaaggtcaagggcgagaagagtggccttatgtccacctgaatgactgcgtgtgtccaaggtggcttcccactgaagggacacagaggtccagtccttctgaagggctaggatcgggttctggcagggagaacctgccctgccactggccccattgctgggactgcccagggaggaggccttggaagagtccggcctggcctcccccaggaccgagatcaccgcccagtatgggctagagcaggtcttcatcatgccttgtcttttttaactgagaaaggagattttttgaaaagagtacaattaaaaggacattgtcaagatctgtcaaaaaaaaaaaaaaaaaa

SEQ ID NO: 152 - DNA, 760 bp, homo sapiens
aagtctagacactaaatgatacaaccttcaccatgtccatcatctaatccaagattctaacgcagagaagcaagaaaatgtgacccaaaaacaaaaccagccttttggccagaaccgtcatcttccagtaatttgccaaaatgatgaatacaaaggcaaaaaggaaaggcactggatatatgttctctaggcctttacaaaaacatggagttgttcctttggccacatatatgctaatctataagaaaggtgatattgcagacatcaagggaaggggtactgttcaaaaaggaatgccccacaggtgttaccatggcaaaactggaagagtctacaattttacccagcatgcttttggcattgttttaaacaaacaagttaagggcaagattcttgccaagagaattaatgtgcatattgagcacattaaacactctaagagccgaggtagcttcctgaaatgcgtgaaggaaaatgatcagaaaaagaaggaagccaaagagaaaagtacctgggttcaactgaagcaccagcctgctccacccagagaagcacactgtgtgagaaccaacgggaaagagcttgagctgctggaatctattccctatgaattcatgcataataggtgttaaagaaataaaataaaagacctctggactatttaaaaaaaaaaaaaaaaaaaggccaggcgcggtggctcgcgcctgtaatcccagcactttgggaggccagggcgggcagatcacaatgtcaggagatc

SEQ ID NO: 153 - DNA, 893 bp, homo sapiens
taagaacccatctagttttgatggtccttgtattcctagcaaatgttacagcacctgcctcagagtgggaatgtaataaatattttttggatttttaaaaatgcagatctttgtaaaaatggagaagaccatcattctcaacattgaaccattggatacaatagaaaatgtaaaggccaagacccaggataaggaaggaatttctcctgaccagcaaagactgatcttcgctgtcaagcaactggaagatggacgtactttgtctgactacaacattcaagaggagtccactcttcatcatgtgttgagatttcatggtggtgctaagaaaatgaagaagtcttatgccattgccaaaaagaatatgcattacagaaagaagattaagctggctgtcctgaaaaactccaaggtgcatgacaatggcaaaattggttgccttcatgggaagtgccttttagatgaatgtggtgcaggaggttttatggccagccactttgacaggcattattgtggcaaatgttgtcttattgcttcaacaaaccagacaagtaatcgtgtatgagttaataagagacatgaactaagaaaataaaagtcataagttgaaatagagattgttcagccagttgacataaggtagagcactgacaaagagaagctgctcacctttagtggtggttatgttcggagctagcagaaaagcctcctgacttcctccaggactcagggaaggcaggggaaggaggactttggtgtcttagtcccttctcacctctttggcattacttccttccctcccaacgtcgcaccttataatctactaactccaaaccaacaggaactctcctcccacgccctacattcaaacaccctaggtttacatgtgcagg

SEQ ID NO: 154 - DNA, 4404 bp, homo sapiens
gagcgcgggtcccgccccggcgggccgctggaaaagtttagtctctgactcgctcgggcagaggccgaggaagccggttccggggacgggcaacagggactcagggaccagaaggcggctgcaggacgcgaccgagcaggaccccaggcccgggaacgacgtcgcgagcgctgagactgccgggcctcccagcccatctggcattcgagcgcaggaccgggcgccccggcaccgccgcgcgccacccgctaggatgccggtggccccagcgccctcagccgacggaggagccctttttcaacgccctcgctggagtctggcctgcacgccttgctgaatgaagccggaacctcagccccgcttccctttgaaatgaatgttcctggggcgccctctcgtggattttggagctaatcgtctgtgaatgccaagtgatggcaactgccctcccgccgcgtctccagccggtgcgggggaacgagaccctgcgggagcattaccagtacgtggggaagttggcgggcaggctgaaggaggcctccgagggcagcacgctcaccaccgtgctcttcttggtcatctgcagcttcatcgtcttggagaacctgatggttttgattgccatctggaaaaacaataaatttcacaaccgcatgtactttttcattggcaacctggctctctgcgacctgctggccggcatcgcttacaaggtcaacattctgatgtctggcaagaagacgttcagcctgtctcccacggtctggttcctcagggagggcagtatgttcgtggcccttggggcgtccacctgcagcttactggccatcgccatcgagcggcacttgacaatgatcaaaatgaggccttacgacgccaacaagaggcaccgcgtcttcctcctgatcgggatgtgctggctcattgccttcacgctgggcgccctgcccattctgggctggaactgcctgcacaatctccctgactgctctaccatcctgcccctctactccaagaagtacattgccttctgcatcagcatcttcacggccatcctggtgaccatcgtgatcctctacgcacgcatctacttcctggtgaagtccagcagccgtaaggtggccaaccacaacaactcggagcggtccatggcactgctgcggaccgtggtgattgtggtgagcgtgttcatcgcctgctggtccccactcttcatcctcttcctcattgatgtggcctgcagggtgcaggcgtgccccatcctcttcaaggctcagtggttcatcgtgttggctgtgctcaactccgccatgaacccggtcatctacacgctggccagcaaggagatgcggcgggccttcttccgtctggtctgcaactgcctggtcaggggacggggggcccgcgcctcacccatccagcctgcgctcgacccaagcagaagtaaatcaagcagcagcaacaatagcagccactctccgaaggtcaaggaagacctgccccacacagccccctcatcctgcatcatggacaagaacgcagcacttcagaatgggatcttctgcaactgatcgtctccatgcgccctgctctgcggctgtgttcttatttattgcatgcgtcgcttccacaggggcccctcaagagctgtgactcgggagagctaccttactttgaccaacagcctgcccagtgtggatgtctcttacagagggggcccaaggaatcaccaccccgcttcagtgtaaacaacgtgccttgtccactttgggctccagagtctttcagatgtactaagctgctgacatcatccactgccttctgctgcatcctagacaccctccctgttgttcacagagagggaaggtcgtgggccacacaatgctgtgtgaccctctccgtgtgcctctgaatggtgttttgatgattttacactacatttcctgtgcgtagaatggatgcttgtatattcgtacatctctatgttacacagaatttgtgttgcaggtgtttgccatgtggtacctacatagaatctccatacaacacacaggtaacaggttatacaagtggattcagactgaacccccagtacaaggacattgttttgaactaggtggacatgccatccctggtctccttagactgacatgattctcatgttaaccaagttttaaaagttcaaattccccaaaaaggcttgtccaaggctggccccagatgtgtgggtctgacccacaccagccctgtgtcctgtcctttcagtcatttgtccctgcgtaattttaatcgtattccaaagcccaattatgtgatggttttcaggtttctgcaaattacagaagagccagccaagatcacccaggagcttgtgcccccagatgggccaaagaaagagcctatgaaggagaagcagaagcagacggctggcctggctcaccttcccacgccagtggggcaggggtctgcttcaggaaatggaagctgtccaggaaatgagcagagattcacaagacagcactttgattctatgttgagtttgtttctatattagaaaagcagcaagtcagtaatcccccgtggcatcacagctaagtagctgtggccaccggcagtttcacagcatcctgaaagctggcactgatcgtgactatcagtgaaagaagtttaattttcaggttagaaaatgtgatctggcagtttatgcattcttcagagtaatgtaataatacctatgtgatgctgtaattttacttttcaacataagttgaacccgtagcagtctgtttaccttgtaaagggattacttagaagacatttttgtacatgctcttccccaaggattgtacgtattatacaaatagatggaaagaaaagtgaacacgtttgtagaactttcataagcacacagttgctgtgttgagttctctttaaaaacaaggacaaaaccaaccagcgttcaaaggaacctcccatcagagtcccctaaagtattttaggttcagtgagcatttgcctgaataaaacctaaaagagtagtcttaacacattactaactttttctaagagaaattgattcctgttttgtcatctgatgcaatttgctcttataaagagacattttcataggttcagagtaactcacctccatgggctgaccaaaggcttttctaatttttgttactgatgagatgaaacctatttgtaaggagatcttccccaggagcatttctgttgccttcttgacatcaatgaaaagtagcatattctcttatgaaatagcatgagaaaacacagggcatttctaggacagtaaaacgttaaagtactggattaagaaaacaacaacaggctgggcgcagtggctcacacctgtaatcccagcactttgggaggctgaggcgggtggatcacctgaggtcaggagtttgtgaccagcctggccaacatagtgaaatcctgtttctactaaaaatacaaaaattagctggatgcgatagcacgtgcctgtagtcccagctactcgggaggctgaggctggagagttgctcaaacccgggaggcggagattgcagtgagccaagatcgcaccgctgcactccagcctgggtgacagagcgaccctctgtctcaaaaaataataataataataaataaaacaacaacaaaatgcatcagagagccaaaacattcagtattgcattttcacataggtgatgaaatgactttggaactttatctgtgttatagttatgagttgctttgggagacttggagctctctgtagctattgttcataacactttgctccataaccctgatgtccgcagtatctaagtatctcagccttcatccattaactctactagggagcccacagccaccatttccactaggaggtatcaatatttgtggtatgacataaggctcccttgaaataacaagacttttgagcaatctgaattaaaaatacatcaaaaaagtaatagcgctcatttgctaaatgcaaaaaataatcacctttgataccaatgtgcaccaatatgcctaactagctagccagctggagataatttaccagggaatgtttcaaagccctaaccttgaagtttggaaacaggtggtcttctatgctgcagagaaactatgcattaggtctcttttcaattagaaacctttactatttccaatgtatgtttgttaaaaataataataataaaaccaaaagcctttgtggaaacccactcttcgtagtccatgtgatgggattgttttatcgttttcaccgggtgccctccccactgcaggggtgcgcactgttgttgcaggcttgctacccacctgtgtttcttagcatttcaggaattaaaccacattcagaaccccaaaaaaaaaaaaaaaaaa

SEQ ID NO: 155 - DNA, 3601 bp, homo sapiens
aacacgacagcggctgccgagcgacccggaagtattcccattttgcgttgtctgggctcggcggcagccgggctcggagtggacgtgccactatggggtcgtccaagaagcatcgcggagagaaggaggcggccgggacgacggcggcggccggcaccgggggtgccaccgagcagccgccgcggcaccgggaacacaaaaaacacaagcaccggagtggcggcagtggcggtagcggtggcgaacgacggaagcggagccgggaacgtgggggcgagcgcgggagcgggcggcgcggggccgaagctgaggcccggagcagcacgcacgggcgggagcgcagccaggcagagccctccgagcggcgcgtgaagcgggagaagcgcgatgacggctacgaggccgctgccagctccaaaactagctcaggcgatgcctcctcactcagcatcgaggagactaacaaactccgggcaaagttggggctgaaacccttggaggttaatgccatcaagaaggaggcgggcaccaaggaggagcccgtgacagctgatgtcatcaaccctatggccttgcgacagcgagaggagctgcgggagaagctggcggctgccaaggagaagcgcctgctgaaccaaaagctggggaagataaagaccctaggagaggatgacccctggctggacgacactgcagcctggatcgagaggagccggcagctgcagaaggagaaggacctggcagagaagagggccaagttactggaggagatggaccaagagtttggtgtcagcactctggtggaggaggagttcgggcagaggcggcaggacctgtacagtgcccgggacctgcagggcctcaccgtggagcatgccattgattccttccgagaaggggagacaatgattcttaccctcaaggacaaaggcgtgctgcaggaggaggaggacgtgctggtgaacgtgaacctggtggataaggagcgggcagagaaaaatgtggagctgcggaagaagaagcctgactacctgccctatgccgaggacgagagcgtggacgacctggcgcagcaaaaacctcgctctatcctgtccaagtatgacgaagagcttgaaggggagcggccacattccttccgcttggagcagggcggcacggctgatggcctgcgggagcgggagctggaggagatccgggccaagctgcggctgcaggctcagtccctgagcacagtggggccccggctggcctccgaatacctcacgcctgaggagatggtgacctttaaaaagaccaagcggagggtgaagaaaatccgcaagaaggagaaggaggtagtagtgcgggcagatgacttgctgcctctcggggaccagactcaggatggggactttggttccagactgcggggacggggtcgccgccgagtgtccgaagtggaggaggagaaggagcctgtgcctcagcccctgccgtcggacgacacccgagtggagaacatggacatcagtgatgaggaggaaggtggagctccaccgccggggtccccgcaggtgctggaggaggacgaggcggagctggagctgcagaagcagctggagaagggacgccggctgcgacagttacagcagctacagcagctgcgagacagtggcgagaaggtggtggagattgtgaagaagctggagtctcgccagcggggctgggaggaggatgaggatcccgagcggaagggggccatcgtgttcaacgccacgtccgagttctgccgcaccttgggggagatccccacctacgggctggctggcaatcgcgaggagcaggaggagctcatggactttgaacgggatgaggagcgctcagccaacggtggctccgaatctgacggggaggagaacatcggctggagcacggtgaacctggacgaggagaagcagcagcaggatttctctgcttcctccaccaccatcctggacgaggaaccgatcgtgaatagggggctggcagctgccctgctcctgtgtcagaacaaagggctgctggagaccacagtgcagaaggtggcccgggtgaaggcccccaacaagtcgctgccctcagccgtgtactgcatcgaggataagatggccatcgatgacaagtacagccggagggaggaataccgaggcttcacacaggacttcaaggagaaggacggctacaaacccgacgttaagatcgaatacgtggatgagacgggccggaaactcacacccaaggaggctttccggcagctgtcgcaccgcttccatggcaagggctcaggcaagatgaagacagagcggcggatgaagaagctggacgaggaggcgctcctgaagaagatgagctccagcgacacgcccctgggcaccgtggccctgctccaggagaagcagaaggctcagaagaccccctacatcgtgctcagcggcagcggcaagagcatgaacgcgaacaccatcaccaagtgacagcgccctcccgccccggccctgcctcaaccttcatattaaataaagctccctccttattttttcctccctggtcgtggtacagattccagggttggatctttggttgggtgtggcacagagtctggctcctgctaggtgagacctggccatcaaatgacacaaacaactaaacgatggaagagagagcgagcccgggtcctctaaggctccttccttctcccctggctgtcggtcacacctctgcagggccggctctctgatagaaagtggaaggcggttttagaaactcatcaccctgctctctcctggcctcgggggctgcacaggtcactgtcctgtaatgtctcccggtcagggcagcccaggactgcccagcctggtgggctggggattgggctttgggtagggcacaggtgccaccttctgtcctggctgtcctgtgccaccctggtctgtgtctagaggagtgaaactcccagggttgggctgggagtatttggtgcacgcggtatggggagggctgagctcagtgcctcctgggagacttgtcccgtgtacagtgacccagaaagatgagattccttggcctgaactctgtgatagagtgtgactgagctgctgggggacatgtgagcctcaaatccatagaaagacaaacggccaccttgggtgcccaggatactggtgcctggccccacgtacacccacatacttctcagatggctcccacattttaagattttaaaaatgaaaccaaaaaataaattgaagaaaactgtaaactttaaagaataatcagctgggcgcagtggctcatgcttgtaatcacagcactttaggaggctgaggcaggaggactgtttgagcccaggagtttgagaccaacctgagtaaggtggcaaaaccccatctctaccaaaaatacaaagattagccaggcgtggtggtgagcgcctgtagtcccagctacttgggatgctgaggtgggaggatcacttgaacctgggagacacaggctgcagtgggccctgattgagccaccacactgcagcctaggtgacagtcagaccctgtctcaaaaaaaataaaaaaaatttaaaata

SEQ ID NO: 156 - DNA, 3044 bp, homo sapiens
atgcgctatttccggtcatacccggaaacacgagtccaagctgcagctggcagggattgcggggtgccggccgtctgagtttttttaaaactgctcgccgcgaagtctgtctgcagccaaaatgtccaacagaaacaacaacaagcttcccagcaacctgccgcagttacagaatctaatcaagcgagacccgccggcctacatcgaggagtttctacagcagtataatcactacaaatccaatgtggagattttcaaattgcaaccaaataaacccagcaaagaactagcagagctggtgatgtttatggcacagattagtcactgctacccagagtacctaagtaattttcctcaagaggtgaaagatcttctctcctgcaatcataccgtattggatccagatctgcgaatgacattttgcaaagctttgatcttgctgagaaataagaatctcatcaatccatcaagcctgctagaactcttctttgaactttttcgttgccatgataaacttctgcgaaagactttatacacacatattgtgactgatatcaagaatataaatgcaaaacacaagaacaataaagtgaatgtagtattgcaaaatttcatgtacaccatgttaagagatagcaatgcaaccgcagccaagatgtctttagatgtaatgattgaactctacagaaggaacatctggaatgatgcaaaaactgtcaatgttatcacaactgcatgtttctctaaggtcaccaagatattagttgccgctttgacattctttcttgggaaagatgaagatgaaaaacaggacagtgactccgaatctgaggatgatggaccaacagcaagagacctgctagtacaatatgctacagggaagaaaagttccaaaaacaagaaaaagttggaaaaggcaatgaaagtgctcaagaaacaaaaaaagaagaaaaaaccagaggtgtttaacttttcagccattcacttgattcatgatccccaagattttgcggaaaaactactaaagcagcttgagtgctgtaaggagaggtttgaagtgaagatgatgctcatgaaccttatctccagattggtgggaattcatgagcttttcctcttcaatttctatccctttttgcaaaggtttctgcagccccaccaaagagaagtaaccaagatccttctgtttgctgcacaagcatctcatcacctagtacccccagagattattcaatcattgcttatgactgtggcaaacaattttgttaccgacaagaactctggagaagtcatgacagtaggaatcaatgctataaaggagataacagctcgatgtcctctggccatgactgaagaacttctccaagacctggctcagtataaaacacacaaggataagaatgtaatgatgtctgctagaactttgattcacctcttccgaacactgaatcctcagatgctgcagaagaaattccggggtaagcctacagaggcctccatagaagcaagagtacaagaatatggagaattagatgctaaagattacattccaggagcagaagttctggaagttgagaaagaagagaatgctgaaaatgatgaagatggatgggaaagtaccagtctcagtgaggaggaggatgctgatggtgaatggattgatgtgcaacactcttccgatgaagaacagcaagaaatctccaagaagctgaacagcatgcccatggaggagcggaaggccaaagctgcagccatcagcactagccgagttttaactcaggaagacttccagaaaatccgcatggcccaaatgagaaaagaacttgatgctgcccccgggaaatcccagaagaggaaatacattgaaatagacagtgatgaagagcccaggggtgaattactttctcttcgggacattgaacgccttcataaaaagccaaagtctgacaaagagacaagactagcaactgcaatggctggaaagacagaccgaaaagaatttgtgaggaagaaaaccaaaacaaatccattttccagttcgacaaataaagagaagaaaaaacagaagaactttatgatgatgcggtatagccagaatgtccggtcaaaaaataagcgttccttccgagaaaaacagttggcactacgagatgcacttttgaaaaagagaaaaagaatgaagtaacttcctggcaagttttccattcctagaagaatgctaagtttgtgtccttgctctgaaaattggtaaatcaagcatgtttgtttacattaaaaagtccagacacactgtattgtgaaaactgctgaacatgtggcagcaattttgtgtttttattttggagacggctaatggtaggaatgttaatgtaaatagtggtggtaatgtaaaatcatttcatttatcattcatgcaaaaaaaagtatgtattgagtgcctattcattgtcactgtagatgcaaaacgaatgagctgtaaccccttcactcaaggcattgacagcttagctgtgagggtggacacacatatgtgtatttacagtgcagtgtaaatagttctgtagtagaggttaactccatatttctgtgaggtcactgaggccttatggactaactctgtgaggataggagttatatattcttataagacaaaacaaaacaggacaatgttacaagagtaagaggttcttacttgtacataggctttcctgctgaaaacaggcccctgctgtacagattttgggtacataatttagctcttttagtcaatccaagagatttaagtgacccccccccccccgtgttttttttgtttttgtttttgttttgaatgccatgtaaaggctttttggttaagacctcacttttaaaactgccttaagtataaatagtacctttggaatatatttagttcatcatttgagctgccttcatactggtttcctcagccttccttcagcctgtaatattttcagcccactgtttaccttgtctcaataaaaggtttctaatgccaaatacgtacctttaaaaaaaaaaaaaaa

SEQ ID NO: 157 - DNA, 2164 bp, homo sapiens
ataaatatcagagtgtgctgctgtggctttgtggagctgccagagtaaagcaaagagaaaggaagcaggcccgttggaagtggttgtgacaaccccagcaatgtggagaagcctggggcttgccctggctctctgtctcctcccatcgggaggaacagagagccaggaccaaagctccttatgtaagcaacccccagcctggagcataagagatcaagatccaatgctaaactccaatggttcagtgactgtggttgctcttcttcaagccagctgatacctgtgcatactgcaggcatctaaattagaagacctgcgagtaaaactgaagaaagaaggatattctaatatttcttatattgttgttaatcatcaaggaatctcttctcgattaaaatacacacatcttaagaataaggtttcagagcatattcctgtttatcaacaagaagaaaaccaaacagatgtctggactcttttaaatggaagcaaagatgacttcctcatatatgatagatgtggccgtcttgtatatcatcttggtttgcctttttccttcctaactttcccatatgtagaagaagccattaagattgcttactgtgaaaagaaatgtggaaactgctctctcacgactctcaaagatgaagacttttgtaaacgtgtatctttggctactgtggataaaacagttgaaactccatcgcctcattaccatcatgagcatcatcacaatcatggacatcagcaccttggcagcagtgagctttcagagaatcagcaaccaggagcaccaaatgctcctactcatcctgctcctccaggccttcatcaccaccataagcacaagggtcagcataggcagggtcacccagagaaccgagatatgccagcaagtgaagatttacaagatttacaaaagaagctctgtcgaaagagatgtataaatcaattactctgtaaattgcccacagattcagagttggctcctaggagctgatgctgccattgtcgacatctgatatttgaaaaaacagggtctgcaatcacctgacagtgtaaagaaaacctcccatctttatgtagctgacagggacttcgggcagaggagaacataactgaatcttgtcagtgacgtttgcctccagctgcctgacaaataagtcagcagcttatacccacagaagccagtgccagttgacgctgaaagaatcaggcaaaaaagtgagaatgaccttcaaactaaatatttaaaataggacatactccccaatttagtctagacacaatttcatttccagcatttttataaactaccaaattagtgaaccaaaaatagaaattagatttgtgcaaacatggagaaatctactgaattggcttccagattttaaattttatgtcatagaaatattgactcaaaccatattttttatgatggagcaactgaaaggtgattgcagcttttggttaatatgtctttttttttctttttccagtgttctatttgctttaatgagaatagaaacgtaaactatgacctaggggtttctgttggataattagcagtttagaatggaggaagaacaacaaagacatgctttccatttttttctttacttatctctcaaaacaatattactttgtcttttcaatcttctacttttaactaataaaataagtggattttgtattttaagatccagaaatacttaacacgtgaatattttgctaaaaaagcatatataactattttaaatatccatttatcttttgtatatctaagactcatcctgatttttactatcacacatgaataaagcctttgtatctttctttctctaatgttgtatcatactcttctaaaacttgagtggctgtcttaaaagatataaggggaaagataatattgtctgtctctatattgcttagtaagtatttccatagtcaatgatggtttaataggtaaaccaaaccctataaacctgacctcctttatggttaatactattaagcaagaatgcagtacagaattggatacagtacggatttgtccaaataaattcaataaaaaccttaaagctgaaaaaaaaaaaaaaaaaaaaaaaaaaaaaaaaaaaaaaaaaaaaaaaaaaaaaaaaaaaaaaaaaaaaaaaaaaaaaaa

SEQ ID NO: 158 - DNA, 1722 bp, homo sapiens
agacagccgtgacagagaaactaggcggtccgctcctgggacgcggtctcgggggcgggttcgcccctgaggcccggtgacccttcgcccgcaaccagggctagcgcttgtgtgcgcccacggaagcacccgagcgaccggagaaagaaaaagtggtcaaggggacctccttccagctctacgcgcctctcattcagagaggtgaggtcaggaaaggggaaggacgaagccccagagcaacagaagtcaggcggtgccaggaacactgagagcggagccaggggaaggcggccgagcgcggccccctctcctcccgggccggggcgggcccgaggcctcgatccgccttccccgcgccgtcctggtcacggccccgcggggcagccatgcctggccgtctgctgcggggcctgtggcagcgatggcgccgttacaagtaccgcttcgttccctggatcgcactgaacctaagccacaacccgaggaccctccgatatgttccagaggaatccaaagacaaagttatctcagatgaagatgtcctaggaacattactgaaagttttccaggctctattcttaaatgatttcaataaacaatcagaaatcttgtctatgcttccagaatctgttaaatcaaaatatcaagacctactggcagttgaacatcaaggggtgaaactgcttgaaaacagacatcaacagcaaagtacctttaaaccagaagaaattctttacaagactttgggtttcagtgttgcccaagcaactagctcattgatttctgctggaaaaggtgtcttcgttactaaaggattggtaccaaaaggcgcagtcgtatctatgtatcctggtacagtatatcagaagtatgagccgatctttttccagtccattggaaatccgtttatttttagatgcctggatggggtactcattgatgggaatgacaaagggatatcaaaagttgtgtacagatcttgcaatgggagggatcgactcggccctttaaaaatgagtgatagtacatggctaacgtcagaaattcataaccctctggctgtgggacagtatgtcaacaattgttccaatgacagagcagctaatgtctgttatcaggaatttgatgtgcctgcagttttccctatagaactgaagcagtatcttccaaacattgcctacagctatgacaaacaaagcccacttcgatgtgttgttcttgtcgcacttagggacatcaatcaaggagaagagcttttttcaaactactacacaattgtcagctaactctgtgaatcagaaattattaggttttctactcagctattaattctaagtgttttttgttaatcacttctctgagttctacctgtaaaacaaatattttgagacttaattggaataggaatttcttatgtttttgttgatattatatttatgttccaatttcatgataaaagctacttgcttcattacaatttcaaatttgtaatgcaattccaagtttaattggttttcacctaaatacacaatagcttattaaattaaaacctactctttgaacttataatttcaatttttcttttgtttattttgtaagctctgtggtggtttataaaattgtagccaggcatcagcagttcttgtagtactgctgatgtgtacaaacttctgtaaaaactttatttttacagaattgagtaaaaaatacctattgtgttgc

SEQ ID NO: 159 - DNA, 2113 bp, homo sapiens
actcaccctccggcttcctgtcggggctttctcagccccaccccacgtttggacatttggagcatttccttccctgacagccggacctgggactgggctggggccctggcggatggagacatgctgcccctgctgctgctgcccctgctgtggggggggtccctgcaggagaagccagtgtacgagctgcaagtgcagaagtcggtgacggtgcaggagggcctgtgcgtccttgtgccctgctccttctcttacccctggagatcctggtattcctctcccccactctacgtctactggttccgggacggggagatcccatactacgctgaggttgtggccacaaacaacccagacagaagagtgaagccagagacccagggccgattccgcctccttggggatgtccagaagaagaactgctccctgagcatcggagatgccagaatggaggacacgggaagctatttcttccgcgtggagagaggaagggatgtaaaatatagctaccaacagaataagctgaacttggaggtgacagccctgatagagaaacccgacatccactttctggagcctctggagtccggccgccccacaaggctgagctgcagccttccaggatcctgtgaagcgggaccacctctcacattctcctggacggggaatgccctcagccccctggaccccgagaccacccgctcctcggagctcaccctcacccccaggcccgaggaccatggcaccaacctcacctgtcaggtgaaacgccaaggagctcaggtgaccacggagagaactgtccagctcaatgtctcctatgctccacagaacctcgccatcagcatcttcttcagaaatggcacaggcacagccctgcggatcctgagcaatggcatgtcggtgcccatccaggagggccagtccctgttcctcgcctgcacagttgacagcaacccccctgcctcactgagctggttccgggagggaaaagccctcaatccttcccagacctcaatgtctgggaccctggagctgcctaacataggagctagagagggaggggaattcacctgccgggttcagcatccgctgggctcccagcacctgtccttcatcctttctgtgcagagaagctcctcttcctgcatatgtgtaactgagaaacagcagggctcctggcccctcgtcctcaccctgatcaggggggctctcatgggggctggcttcctcctcacctatggcctcacctggatctactataccaggtgtggaggcccccagcagagcagggctgagaggcctggctgagcccctcccgctcaagacagaactgaggtgtggacacttagccctgtgggacacatgcaggacatcactgtcagcttctttctggaagctcacatcccactgactacccctcttttccttcctgccccataccccttctacttattcccctctgcttgtgagtcttgccccaccacacctgcatccccatctgcaccccatcccctctccacctgcccttctcttccctctccatccaccatctccagccctgtgaagggaatgtactttcggtcttatacccccattacccattacccaaaagttaccttttttttttttttttttttttgagacagagtctcactctgttgcacaggctggagttcagtggcacaatctccgttcactgcaacctccacctctggggttcaagcaattctcctgcctcagcctccctagtagctgggattacaggtgcctgccaccacatccagttaattttttttttttgtatgttagtagagatggggttttaccatgttggccaggtctcgaactcctgacctcaagcaatccactgcattggcctcccaaagtgctggcattacaggtatgagccaccgtgcctggctgccaaaagttaccttcttaacacttgaatttctggtctcctcagcttccctatccatataggcacagagaggcagcatttgttttccagttaaaactctacctcattgtgattattatccaatacaattgttacaaaataagtaaaacttttatgaaacaatacaacataactgattttactctttaa

SEQ ID NO: 160 - DNA, 1601 bp, homo sapiens
ggcgaccgcggctgaggtacaggtgcctcgcggtgcagccgggtcgccttccagcccgtccgcctcccgaccagggcccgcgccccgtcccgcctctctcccgcccagccaaatgcaggccgccgccctccctgaggagatccgttggctcctggaagatgctgaagagtttctggcagaaggtttgcggaatgagaacctcagcgctgttgcaagggatcacagagaccatattctacggggctttcagcaaatcaaagccaggtactattgggattttcagccccaagggggagacattggacaggacagctctgatgataatcacagcgggactcttggcctgtccctcacatccgatgcaccctttttgtcagattatcaggatgagggaatggaagacatcgtaaaaggagctcaagaacttgataacgtaatcaagcaaggatacttggagaagaaaagcaaagatcatagtttctttggatcggagtggcagaagcgatggtgtgttgtcagcagaggtctcttctactactatgctaatgagaagagcaagcagcccaaagggaccttcctcattaagggctacggtgtacggatggccccccacctgcgaagagattccaagaaagaatcctgctttgaactgacctcccaggataggcgcagctatgagtttacagctactagtccagcagaagccagagactgggtggatcaaataagtttcttgttaaaggatctgagctccttaaccattccatatgaagaggatgaggaggaagaagaaaaagaagagacatatgatgatattgatggttttgactccccaagttgtggttcccagtgcagacccactatcttgcctgggagtgtggggataaaagagcctacagaggagaaagaagaagaagatatttatgaagtcttgccagatgaagagcatgatctagaagaggatgagagtggcactcgacgaaaaggagtagactatgccagttactaccagggcctatgggattgccatggtgaccagccagatgaactgtccttccaacggggtgacctcatccgtattctgagcaaggagtataacatgtatggctggtgggtgggagaactgaacagcctcgttgggattgttccaaaggagtatctcaccactgcctttgaagtggaagaaagatgaaacccaggaaatatattcttccctctctcctgcctttatgaggaaactgatcatcaaaagttcccactccctacttctgccaccccaccaacgccttggactcctctctttgctgaagagacccaagtctcttgacacctcagagtgactgtaagctaccagtaagacaagtgggaagaggcacgttcatcaaacctgttactaaaccagcctagtcatagctcatccccatctctaaatgtgtccacacaaccacatctgccttttccacaagcttttcacaaagaaggtgagagagaaggaaaccttgggaggaggacattactggttgttctggctggtttgaaaagcacaaataaacttgggatgtggttccttgccatgaaaaaaaaaaaaaaaaaaaaaaaaa

SEQ ID NO: 161 - DNA, 2983 bp, homo sapiens
aagcactgagcctggccccacgtccaggcaccaggacctccaatccaatggtgtcttcttcctcccagtcacactgttcactttgccctacagcagcaagggctaaactaggagaggccaaaagcccaggcaagtcctggttgggcaagcaattgcgagtgaaactgaggaccatcctgactgagatgggtctttcataagtcccccaagagccaggtgaggcatcatcaacatcagcctctcctgccaccaccgcttccctgattcatgcacttcaggcttcagccagcagcacgcatccttggggttaggagccagcatctcaggtcagcagccatggtttctctggagaaagacccatcagaggctcattcagagccttaaccctgagcctctgccacctacccaccgtgttgaagatgtcattgcttggaagggactacaacagtgagctgaactccttggacaacggacctcagtcaccctcagagagcagcagtagcattacttcagagaatgtccatcctgctggagaagctggactatcgatgatgcaaactttgatccacttgttgaaatgcaacattggcacagggctcctggggcttcccctggccataaagaatgccggcttgttggtcggtcctgtcagccttctggccatcggggtcctcaccgtgcactgcatggtcatcctgttgaactgtgctcaacacctcagccagagactgcagaagacttttgtgaactatggagaggccacgatgtacggccttgaaacctgcccgaacacctggctgagggcccatgcagtgtggggaagatggaatttggctctgtcacccaggctggagtgcagtggcaagatctcagctcactgcaacccccaccttcagggttcaagcaattctcctgcccaagcctcccgagtagctgggatttacaggtacactgtcagcttcttattagtcatcacccagctgggcttctgcagtgtttattttatgtttatggcagacaatttacaacagatggtggaaaaagcccacgtgacctccaacatctgccagcccagggagattctgacgctgacccccatcctggacattcgtttctacatgctgataatcctgcccttcctgatcctgttggtgtttatccagaacctcaaggtgctgtccgtcttctcgacattggccaacatcaccacccttgggagcatggctctgatctttgagtatatcatggaggggattccatatcccagcaacctacccttgatggcaaactggaagaccttcttgctgttctttggtacagccatcttcacatttgaaggcgtcggtatggttctgcctctcaaaaaccagatgaagcatccacagcagttttcttttgttctgtacttggggatgtccattgtcatcatcctctatatcttactggggacactgggctacatgaagtttgggtcagacacccaggccagcatcaccctcaacttgcccaattgctggttgtaccagtcagtcaagctgatgtactctatcggcatcttcttcacctatgccctccagttccacgtcccagctgagatcatcatcccgtttgccatctcccaagtgtcagagagctgggcactgtttgtagacctgtctgtccgctcagccttggtctgtctaacctgtgtctcagccatcctcatcccccgcctggacttggtcatctccctggtaggctccgtgagcagcagcgccctggctctcatcatcccagccctcctggagatcgtcatcttttactctgaggacatgagctgtgtcaccattgccaaggacatcatgattagcatcgtgggccttttagggtgtatatttgggacataccaagccctctatgagttgccccaacccatcagccattccatggccaactccacaggtgtccatgcataattatctgtttttattctaatagctctcccttcctcccatccccagtttgacttccatgtggatgttatataccttcatcaaatcccaacatctctatattaattagtggcgtctttatctttccaagagaaatgcagatgagaaaagttagcactgatgtctctcaggctacacctcttttggttttatattttttggatggccttttgtacctctgaaccaaaattagattcaactattcatattatcagcctcattttatggaaaagggatgccacttaccccaatagcccttgaaacagagaccaagcataaatacaaaagtaactgttttctctacactgcagtagctgcccttaaagcatcagatttagaaaagtgtatgttgggcgaagggagttttctatttagatattctaagtagaagagtcatagacagaacaaaaacagaactcagcagtaattttgtccaaccactggctccgccactgatttcctactggccctcaggcaagttcctccccatctctcagtctatgaagtgaacagttggactaactgattattaaggactctgtcaactctgatattctgaaagtgaataaaagaaattaacttatccaccaaccacaaaaactggccatgctagtgttggtgaggaggtggagtaactgaaactccataccctgctatgtggatagaaagtagtacaatcagtttgataaacatcttgtagtttctttaaaacttaaacatatacctaccatatgatccaactattccactccagaaaaaagaaatatatatccataaaaagacttgtacaaaaatattcatggtaactttacttataaaagcaaagaagttggaaatactctaaatgtctataaacaagagaatggataaataaattgtgatgtagccatacaatggaatattcctcagcaaggaacagaaacaaactgttgaaatacacaataaaatgtatgaatcttaaaataaatatgctgaatgacaaaatccagacc

SEQ ID NO: 162 - DNA, 6053 bp, homo sapiens
taggttgtgacagttggaagtgtcatgtacaacatgcggcgattaagtctttcacccaccttttcaatgggatttcatctgttagttactgtgagtctcttattttcccatgtggaccatgtaattgctgagacagaaatggaaggagaaggaaatgaaactggtgaatgtactggatcatattactgtaagaaaggggtgattttgcccatttgggaaccccaagacccttcttttggggacaaaattgctagagctactgtgtattttgtggccatggtctacatgtttcttggagtctctatcatagctgatcggttcatgtcctctatagaagtcatcacatctcaagaaaaagaaataaccataaagaaacccaatggagagaccaccaagacaactgtgaggatctggaatgaaacagtttctaacctgaccttgatggccctgggatcttctgctcctgagattctcctttcagtaattgaagtgtgtggccataacttcactgcaggagacctcggtcctagcaccatcgtgggaagtgctgcattcaatatgttcatcattattgcactctgtgtttatgtggtgcctgacggagagacaaggaagattaagcatttgcgtgtcttctttgtgacagcagcctggagcatctttgcctacacctggctttacattattttgtctgtcatatctcctggtgttgtggaggtctgggaaggtttgcttactttcttcttctttcccatctgtgttgtgttcgcttgggtagcggataggagacttctgttttacaagtatgtctacaagaggtatcgagctggcaagcagagggggatgattattgaacatgaaggagacaggccatcttctaagactgaaattgaaatggacgggaaagtggtcaattctcatgttgaaaatttcttagatggtgctctggttctggaggtggatgagagggaccaagatgatgaagaagctaggcgagaaatggctaggattctgaaggaacttaagcagaagcatccagataaagaaatagagcaattaatagaattagctaactaccaagtcctaagtcagcagcaaaaaagtagagcattttatcgcattcaagctactcgcctcatgactggagctggcaacattttaaagaggcatgcagctgaccaagcaaggaaggctgtcagcatgcacgaggtcaacactgaagtgactgaaaatgaccctgttagtaagatcttctttgaacaagggacatatcagtgtctggagaactgtggtactgtggcccttaccattatccgcagaggtggtgatttgactaacactgtgtttgttgacttcagaacagaggatggcacagcaaatgctgggtctgattatgaatttactgaaggaactgtggtgtttaagcctggtgatacccagaaggaaatcagagtgggtatcatagatgatgatatctttgaggaggatgaaaatttccttgtgcatctcagcaatgtcaaagtatcttctgaagcttcagaagatggcatactggaagccaatcatgtttctacacttgcttgcctcggatctccctccactgccactgtaactatttttgatgatgaccacgcaggcatttttacttttgaggaacctgtgactcatgtgagtgagagcattggcatcatggaggtgaaagtattgagaacatctggagctcgaggaaatgttatcgttccatataaaaccatcgaagggactgccagaggtggaggggaggattttgaggacacttgtggagagctcgaattccagaatgatgaaattgtcaaaacaatatcagtcaaggtaattgatgatgaggagtatgagaaaaacaagaccttcttccttgagattggagagccccgcctggtggagatgagtgagaagaaagccctgttattgaatgagcttggtggcttcacaataacaggaaaatacctgtttggccaacctgtcttcaggaaggttcatgctagagaacatccgattctctctactgtaatcaccattgcagacgaatatgatgacaagcagccactgaccagcaaagaggaagaggagaggcgcattgcagaaatggggcgccccatcctgggagagcacaccaagttggaagtgatcattgaagaatcctatgaattcaagagtactgtggacaaactcattaagaagacaaacctggcccttgtggttgggactaacagctggagagaacagttcattgaagctatcactgtcagtgctggggaagatgatgacgacgatgaatgtggggaagagaagctgccctcctgtttcgattacgtgatgcactttctgactgtgttctggaaggtcctgtttgccttcgtcccccctactgaatactggaatggctgggcgtgtttcattgtctccatcctcatgattggcctactgacagctttcattggagacctggcttcccactttggctgcaccattggcctgaaagattctgtgactgcagtcgtgttcgtcgcacttggaacatcagtgccagacacatttgccagcaaagtggcagccacccaggaccagtatgcagacgcctccataggtaacgtcacgggcagcaacgcggtgaatgtcttcctgggaatcggtgtggcctggtccatcgctgccatctaccacgcagccaatggggaacagttcaaagtgtcccctggcacactagctttctctgtcactctcttcaccatttttgctttcatcaatgtgggggtgctgctgtatcggcggaggccagaaatcggaggtgagctgggtgggccccggactgccaagctcctcacatcctgcctctttgtgctcctatggctcttgtacattttcttctcctccctggaggcctactgccacataaaaggcttctaaaggaactatcagatatagtaaatttatatatatacatatatatacataaaaattatgtataatggacagaggaaactgacatttgtcatgttcacttacctgctgatggaatccagcttcaagagcatactctgtactagggccgaagtaaaaaaccatcacctcccattcccaggggcatcatcatgttcaacaaggcatggaggcagggccatctttgcagctcagtctagaagggctgcactctctccaggttgataaatccttaaggctttgatttgttttgtttttggttttgttttcagtggagctggggaggtagttaatgtttggctttatttttgttattttgttttgttttgtttttttgggagagtcagggttgttgcttttctttgtggaaagtgaaaccatccaaatgtaaatgggttttggtaaaaatttaaatcattagtattccccctcacctcccccaatcactttaaaacttattttggattaagaaaaaatctgggcatggaagaagaaagaagcatgtcttcatcgtattaccaaagttcatgcttatctccggaatgtgagtggaggtgaagctgcctccaagaagaagcataaaagtggaatggagccaggaaatccgatggttctagaaatagtctgatatttaaacatgtgatacctggcagtctcgtttaacaggtacaaggaaaacgtgcctagattcccaggaacgtgcaaaatcctttctttcttatctctttagctctggactgtgattggcaaggtccttcttccagcattcagcccagctaagcccccaggtgccccatcccaaccctgttcctcctgtccacctgccatcccctatgcaaacagtaagaataaccccattcaaaaagcacatcatcgttttccatttgcattaacatgtgtctcagtcccatgttgccgttgcttgggattgtctgtcagttttattttcaaaggcatccatggcttgcacaatcctgttccagtcatgactgaacatttgctccttcttcatgtgccgttcggaaatgttgttgtgatacctgttacacagtgcatggtgaaaaacaaataaaacaaaacaaagagtatctgtatatagtagagtatagtacatactgttctcccatttggcaatgttgattggacattgaagacataagtgagttttcttttcacctgagttgttacttttgtgctgttattgagtttgattaattactagggataaaaggagaaaatggattattgttcacggttctgcacattcatttctaagaagcaataactgtcatgtggggagaagttaaagctattgagaggatagcaggcaaactacaaagatcttcatggaaaattagccatgtggaacacatcagaggcctctaaaaatcacccattaattcaggaaggccaaggagaaaggccttatagagacgttgatatgttggatgtgcctaggctttcagagccaccctttccacaacacccctccctgcaaagtatttatttcacatctgcactgtctggcacagatggtagatagtgctggtttgttcattttatttttttacttaaaaggctattttgagccctgtttctttcactgtccagtctagtcctctttgattatatcagtagttgctgagtaagaaagaagccagggtgaccaacgggcctttaaaagtgttgtctcctctacttatgctgaaagagaaggcaattaaataagactagtacctcccaggaggattggactgggatatttttaaccctttaaaaagaatagctgtttctatgttaaaataccaaagaacatggataaacccaacattccaaagtagtgagtccactaatgagaaaaataatagaatgactttggtcacctctcggagacttctgtgtctataaggaatcccaggctggagacattcctagccctctgtattgattcaaaaatacttaataaattaaagctgttgagacttattttttcttctgtcactcagtaaccatgatccttcctcatttaataaacatttggtgactgaatgagtaattaaatgctggttacccacttaatgtgccaggtagtatgatactttctggggactaagccatgaacaaaacagtctagatccctgccctcagaagggttacagtttatgtgattactattttcatgagtaaaagtgaagaaagccatatggaaagatttttatcttgcaagaaaaaacaattatgaaactcttttaacataaacacactgaaactgtatcaaagcaattgtccaaattgtatttatacccaagaatttctttaactaagagagcataaggcatatgtttggaaaaccaccctctttatctttgaccgacttgcagataaatatatctctccattttaaaccaagaagggcaatcatgttggtgatccagatcactgagaaagcccagtgtatcccatcttttatctttgttggcaatggaacttttctatggcccacactttacaattctttgtcattctaacccatccttcccatccttattttttttttttttgagaattgctaaatggaaagctagcctagaagcaccaagtaaatatattcaaggaatataagttgtttaaacattagaaaaatttttgcactcattttttagctgtattaggaatgtcaataatcctgtagcaaattttcacagagaactttaagaaattcttgcattggtcgatttcaatttgaaagctttttggtttgtttgctttttaaattttcatgttctaggaaactatgattctggttgttcaggattgttattattatagttgtgtaaaattattttattttgtgtgtattgtgcacagcttggggggggggcgggaaatgcactaattgtgctcttccttataaatggtacatattactgacacagacaaataaagtttctaattgtttctgatttaatcactagtgatacagcatattctgtatgaaatgttttctcctttctcattgtcatctacttcattttttgttttcatgttttgaagaaataaaaaccaaaatggta

SEQ ID NO: 163 - DNA, 49009 bp, homo sapiens
aaataatgagagacatagtgcattagaaaataaagtaaacatttctgttttctttctcagaaaaatgaactgtcatgtatgtttattttctttcttttaagggatgttactggctggttttacaattaggaatgttccattcatcaatgaacatgtccatgttcctaacgcatggtcttcaattttaagaagcattgcccttaacattattctaatacgagctgggcttggactcgatccacaggtagatttacaattacaaatcgagtaaggttatttcaaatattagaggatggtgagaaagaaaaagaagcaaaaattttatttacctgttccaagtggagtctgtaaacaaacctaagataaagaaaaaaaggccgggcatgatggctcatgcctgtaatctacaaaaattagctgggcatggtggcatttacctggtaatcccagctactcgagaggctgaggcaagagaatcgcttgaacctgagtgacagaggttgcagtgagctgagataatgccactgcaatccagcctgggggacagagtgagactctgtctcaaaaaacaaaacaaaacaaaacaaacaaacaaaggttttataagaaaaaccttatacaattctttttcttttttagggtgattaaggatttcagtaattttttatgacgttttctctacaggattatgttcctgattatctttgcattattgtaaaatctaatcttttaaaacatttcttaaaatattacattctagggatcataaattccatctataagaagatgactattcatgaatatgacagccactcaaatatatgtggcaaatgtggtttaatagaaatagctcgagcacaaataattatagccaatgagattatattctccagtagaaagtatgaaccaaggagaaaattgaaaagttctcccttttaaaatgaattatgcagtttttaagttattttctttggcatgttagtattgtatttatacttattaagttaatcaaacagttcatatcaaaaagttaatgggaaaacactaataggacactattattatactatgtattaggaaagttcaggaaggtagcattaactatttaatcacagtaaaattgatcttttaataattaaaatatacaataatattttataaaagatgaaattgtttataatccaacctatgatgacatataaaatataatagagttcaaagtccagtgggacaatctgttgaaatgagattttgtttagtgaaagcttcttatgaaaaaagactttatagaccaacatttgttaaaataattttctttttggccattgtaaatgtatcaaatgtgactgttttgtgtttcaggctttgaggcatttgaaggtggtttgtttcagattggctataggtccatgccttatggaggcaagtgcagctgctgttttatcccacttcattatgaaattttcctggcaatgggcaattctattagggtaatttctttctcattttttcttacgaaaatattcaattaaagaggcttggttaaaactgttaaaatattcagaatattgtatagaaaagctctattaaaattcatttcacagtgttaaaatccttggaaagcacttgattaaaagcagagcatgtcccaaattgcacgaaattttttaacaaacattaatagcccctaaatgtttatcatcaagaaaattcgcgtgatcaatttattccttttcatctgtattataacatatctgtatgctttaatctatctaatggcctcttcctcatggctatatgtaaatacagttgcacatttcatatatatgtatgtgtatatatatatatatatttgagaaacattttatatagacagaagaaagcaagcaaacaaaatctcttgccgtatatccaatgccccatccatctttatctaccatccatttgtcttatgtttgaattcctcaaaataagtctataactactgtctctagatcctaactccttttcatttcttaattaatcaacttttgtctctgcttatccattccaatgacactcatagcaaagttcatccattacatagttactacaaaatccagtgaatttttaaattaatgtttatgataaaatactcaaatgcacttttattttaaaaattagaactttataaataaaggaggaatgaccttaaactatgccttcaaatcataatgcccataactctacccaaagtgacaactcttaggagtttttttcttctccaatttttattttggctcaaggggtacattagcaggcttgttatatggataaattgcatgtcacaggggtttggtatgcagagtgacgattgatcccttctttctgtccatgtgtactcagtgtttagctcccacttataagtgagaatatgggatatttggtttcctgctcctgcgttaattaactttgtgtattattctatggtgtatatgtgccacattttctttatccagttcaccattgatggacatttaggttgatctcatgtcttttttattttttttcattagtttttaaggaacaggtggtgtttgtttacatggaaaatatttttagtggtaatttctgagattttggtgcacccatcaccagagcactgtacactgcacccaaggtgtagtcttttatccctcaccctcctcctactcttccccctaagtccccaaagtccattgtatcattcttgtgcttttgcatcctcatagcataactcccacttataagtcagaatatacaatgtttggttttttcattcctgaattacttcacttagaataatggtgtccgactccttccaggctgctgtgaatgccattatttcattcctttttatagctgagtagtattctgtccatggtctgtgtgtgtatatatatacacacacatacacatatatatacacatatatacacatatgtgtgtatatacacatatatacacatatatacacacatatatgtgtgtatatacacatatatatacacatatatgtgtatatacacatatatacacatatatgtgtgtatatacacatatatatatgcaccacattttctctatgcattcattgattgatgggcatttgagctagttccatatctttcacaattgcaaattgtgctgcagtaaacgtgtgtccaagtatttttttcatataaagacttcttttcctctgggtagatacctagtagtgggattgctagatcaaatggtagatctacttttaattatttaagaaatcttcatactcttttccatagtggttgtcctagtttacattccccccagcagtgtaaaggtgttccctttttaccacacccatggcaacatctatttttttttaattttttgattatggctattcttggaggagtgagatggtatcgcattgtggttttgtttgcatttccctgataattagtgatattgaggattttttcatgtttcttggccatttatatcttcttttgggaagtgtctattcatgtccttaacacactttttgatagggtagtttgtttttttcttgctgatttgtttgtgttccttatggattctacatattagcactttgttggatgcatagtttgtaaagattttctcccactctatataggttgtctttttactctgctgattaattcttttgctgtgtagaagcttcttagtttaattaagtcccatctacttatctttgcttttgttgcctttgcttttgggttcttggtcatgaagtctttgcctaagcaaatgtctagaagggtatttccaatgttaccttctagaatttttatagttttaggtgttagatttaagtctttgatccatcttgagttgatttttgtataaggtgagagatgaggatgcagtttcattcttctacatatggcttgccaattaacccagcaccatttgttgaatatggtgtcctttcccaactttatgtttttgtttcctttgttaaagatcagttggcttaagtatttggctttatttctcagttctctattcgattccattagtctacgtgcctatttttatagcagtattatgctgctttggtgactatagacttatagtacagcttgaagtcaagcaatgtgatgcatccacatttgttctttttgcttagtcttgctttcgttatgcgggctatttttgagttccacatgaattttaggaatgctttttctagttcagggaagaatgatgatctatgatcatcagtgataactgtcctgaagttttcttttttgttgtgtctctgccaggttttcatatctgaatgatgctgacctcataaaatgagttagggagggatccttcctcctccttttttcggaacaatttcagtagcattgataccagctcttctttacacttccggtagaatttgtctctgaatctgttgggtcctgggcttgcatttttttttctttttttggctcagagactttttattactcattcagtttcaaaacacattttttgctttgttcaggatttcaatttcttcctagttcaatcttgggaggttgtatgtttccagaaatttacccatttcttttttttttttttatatactttaagttttagggtacatgtgcacattgtgcaggttagttacatatgtatacatgtgccatgctggtgcgctgcacccactaactcgtcatctagcattaggtatatctcccaatgctatccctcccccctccccccaccccaccacagtccccagagtgtgatattccccttcctgtgtccatgtgatctcattgttcaattcccacctatgagtgagaatatgcggtgtttggttttttgttcttgtgatagtttactgagaatgatgatttccaatttcatccatatccctacaaaggacatgaactcatcattttttatggctgcatagtattccatggtgtatatgtgccacattttcttaatccagtctatcattgttggacatttgggttggttccaagtctttgctattgtgaataatgccacaataaacatacgtgtgcatgtgtctttatagcagcatgatttatagtcatttgggtatatacccagtaatgggatggctgggtcaaatggtatttctagttctagatccctgaggaatcgccacactgacttccacaatggttgaactagtttacagtcccaccaacagtgtaaaagtgttcctatttctccacatcctctccagcacctgttgtttcctgactttttaatgattgccattctaactggtgtgagatggtatctcattgtggttttgatttgcatttctctgatggccagtgatgatgaacattttgtcatgtgttttttggctgcataaatgtcttcttttgagaagtgtctgttcatatccttcacccactttttgatggggttgtttgtttttttcttgtaaatttgtttgagttcattgtagattctggatattagccctttgtcagatgagtaggttgcgaaaattttctcccatgttgtaggttgcctgttcactctgatggtagtttcttttgctgtgcagaagctctttagtttaattagatcccatttgtcaattttggcttttgttgccattgcttttggtgttttggacatgaattctttgcccatgcctatgtcctgaatggtaatacctaggttgtcttctagggtttttatggttttaggtctaacgtttaaatctttaattcatcttgaattgatttttgtataaggtgtaaggaagggatccagtttcagcttcctacatatggctagccagttttcccagcaccatttattaaatagggaatcctttccccattgcttgtttttctcaggtttgtcaaagatcagatagttgtaggaatgcggcgttatttctgagggctctgttctgttccattgatctatatctctgttttggtaccagtaccatgctgttttggttactgtagcttgtagtatagtttgaagtcaggtagtgtgatgcctccagctttattcttttggcttaggattgacttggcaatacgggctctttttttggttccatatgaactttaaagtagttttttccaattctgtgaagaaagtcattggtagcttgatggggatggcattgaatctgtaaattaccttgggcagtatggccattttcacgatattgattcttcctatccatgagcatggaatgttcttccatttgtttgtatcctcttttatttccttgagcagtggtttgtagttctccttgaagaggtccttcacatcccttgtaagttggattcctaggtattttatactctttgaagcaattgtgaatgggagttcactcatgatttggctctctgtttgtctgttgttggtgtataagaatgtttgtgatttttgtacattgattttgtatcctgagactttgctgaagttgcttatcagcttaaggagattttgggctgagacaatggggttttctagatatacaatcatgtcatctgcaaacagggacaatttgacttcctcttttcctaattgaataccctttatttccttctcctgcctaattgccctggccagaacttccaacgctatgttgaataagagtggtgagagagggcatccctgtcttgtgccagttttcaaagggaatgcttccagtttttgcccattcagtatgatattggctgtgggtttgtcatagatagctcttattattttgaaatacatcccatcaatacctaatttattgagagtttttagcatggaaggttgttgaattttatcaaaggctttttctgcatctgttgagataatcatgtggtttttgtctttggctctgtttatatgctggattacatttattgatttgcatatattgaaccagccttgcatcccagggatgaagcccacttgatcgtcgtggataagctttttgatgtgctgctggattcggtttgccagtattttattgaggatttttgcatcaatgttcatcaaggatattggtctaaaattctcttttttggttgtgtctctgcccggctttggtatcagaatgatgctggcctcataaaatgagttagggaggattccctctttttctattgattggaatagtttcagaaggaatggtaccagttcctccttgtacctctggtagaattccgctgtgaatccatctggtcctggactctttttggttggtaaactattgattattgccacaatttcagctcctgttattggtctattcagagattcaacttcttcctggtttagtcttgggagagtgtatgtgtcgaggaatttatccatttcttctagattttctagtttatttgcgtagaggtgtttgtagtattctctgatggtagtttgtatttctgtgggatcggtggtgatatcccctttatcattttttattgtgtctatttggttcttctctctttttttctttattagtcttgctagcggtctatcaattttgttgatcctttcaagaaaccagctcctggattcattgattttttgaagggttttttgtgtctctatttccttcagttctgctctgattttagttatttcttgccttctgctagcttttgaatgtgtttgttctttcttttctagttcttttaattgtgatattagggtgtcaattttggatctttcctgctttctcttgtgggcatttagtgctataaatttccctctacacactgctttgaatgcatcccagagattctggtatgttgtgtctttcttctcattggtttcaaagaacatctttatttctgccttaatttcgttatgtacccagtagtcattcaggagcaggttattcagtttccatgtagttgagcagctttgagtgggattcttaatcctgagttctagtttgattgcactgtggtctgagagatagtttgttataatttctgttcttttacatttgctgaggagagctttacttccaactatgtggtcaattttggaataggtgtggtgtggtgctgaaaaaaatgtatattctgttgatttggggtggagagttctgtagatgtctattaggtccgcttggtgcagagctgagttcaattcttgggtatccttgttgactttctgtctcgttgatctgtctaatgttgacagtgtggtgttaaagtctcccattattaatgtgtgggagtctacgtctctttgtaggtcactcaggacttgctttatgaatctgggtgctcccgtattgggtgcatatatatttaggatagttagctcttcttgttgaattgatccctttaccattatgtaatggccttctttgtctcttttgatctttgttggtttaaagtctgttttatcagagactaggattgcaacccctgcctttttttgttttccatttgcttggcagatcttcctccatccttttattttgagcctatgtgtgtctctgcatatgagatgggtttcctgaatacagcacactgatggatcttgactcttcatccaatttgccagtctgtgtcttttaattggagaatttagtccatttatatttaaagttaatattgttatgtgtgaatttgatcctgtcattatgatattagctggtgattttgctcgttagttgatgcagtttcttcctagtctcgatggtctttacattttggcatgattttgcaggggctggtaccggttgttcctttccatatttagcacttccttcaggagctcttttagggcaggcctggtggtgacaaaatgagtcagcatttgcttgtctgtagagtattttatttccccttcacttatgaagcttagtttggctggatatgaaattctgggttgaaaattcttttctttaagaatgttgaatattggcccccactctcttctggcttgtagggtttctgccgagagatccactgttagtctgatgggcttccctttgagggtaacccgacctttctctctggctgtccttaacattttttccttcatttcaactttggtgaatctgacaattttgtgtcttggagttgctcttctccaggagtatctttgtggtgttctctgtttttcctgaatctgaatgttggcctgccttgctagattggggaagttctcctggattatgtcctgcagagtgttttccaacttggttccattctccccatcactttcaggtacaccaatcagacatagatttggtcttttctcatagtcccatatttcttggaggctttgctcatttctttttattcttttttctctaaacttcccttctcacttcatttcattcatttcatcttccattgctgataccctttcttccagttgatcgcatcggctcctgaggcttctgcattcttcacgtagttctcgagccttggttttcagctccatcagctcctttaagcacttctctgtattggttattctagttatacattcttctgaattttgttcaaagttttcaacttctttgcctttggtttgaatgtcctcccgtagctcagagtaatttgatcgtctgaagccttcttctctcagctcgtcaaagtcattctccatccagctttgttctgttgctagtgaggaactgcgttcctttggaggaggagagacgctctgcgttttagggtttccagtttttctgttctgttttttctccatctttgtggttttatctacttttggtctttgatgatggtgatgtacagatgggttttcggtgtggatgtcctttctgtttgttagttttccttctaacagacaggaccctcagctgcaggtctgttggaataccctgccgtgtgaggtgtcagtgtgcccctgctggggggtgcctcccagttaggctgctcgggggtcaggggtcagggacccacttgaggaggcagtctgccggttctcagatctccagctgcgtgctgggagaaccactgctctcttcaaagctgtcagacagggacatttaagtctgcagaggttgctgctgtctttttgtttgtctgtgccctgcccccagaggtggagcctacagaggcaggcaggcctccttgtgctgtggtgggctccacccagttcgagcttcccagctgctttgtttacctaagcaagcctgggcaatggagggcgcccctcccccagcctcgctgcctccttgcagtttgatctcagactgctgtgctagcaatcagcgagattccgtgggcgtaggaccctccaagccaggtgtggcatatagtctcgtggtgcgccgttttttaagccagtctgaaaagcgcaatattcgggtgggagtgacccgattttccaggtgcgtccatcacccctttctttgactcagaaagagaactccctgaccccttgcgcttcccaggtgaggcaatgcctcgccctgctttggctcacgcacagtgagcacacccactggcctgtgcccactgtctggcactccctagtgagatgcacccggtacctcagatggaaatgcagaaatcacccgtcttctgtgttgctcacgctgggagctgtagaccggagatgttcctattcggccatcttggctcctccccccgaaatttacccatttcttgtaggtgttctactttgtttgcataaacatgttcatcatagtctctgagagttttttgtatttctgtgtggttggcggtaatgtccactttaccatttctgattgtgttttttgtatcttctctttttttttttccttattggtctagctagtgacctatcaaatttatttattcttttgaagaaccagcttttagtttcatttatcctttgtatgccttttcatgactcaattttattccattctgctctgattttggttatttattctcttctgctagctttgggttggtttcctcttgtttttctatttcctttaagtatgatattaggttgttaatttaagatccttctaacttttcaatatgggcatttagcacgataaacttttcccttaacactgctttgcctgtgtcttagagagcctagaatgttgtatctttgttttaattagtttcaaagaatttattggtttctgccttaatttcattgtttacccaaaagtcattcaggcacaggttgtttaatttccatgtaattgtatggttttgagagttcttcttagtgttgacttctatttttgttacactgagcggtccaagattgtggttggcatgatttcaggggtttcttttaatttactgaaaataattttagactgatagtgtgatcaattttacaatatatgccatgtacagatgagaggaagatatattctgttgttgttgggtggagtgttctgtagatggctgttaggtccatttagccaagtgttgacttcaagtcctgaatatctttgttcattttctgtctctatgatctgtctagtaccgtcagtgagatgttgaagtctcccactattctgtggttatctaagtctctctataggtatctatgaacttgttttacgaatgtgaatgctccagttttgagcacatttatctttcagacagttaagtcttcttgttgaattgaaccctttatcattacttagtgcccttctttgtctttttgattgttgttggtttaaagtctattttgtctgaattagaataacaatgcttacccttttttgttttacatttgcttggtagatttttttccatccttttacttcaagcgaatgggtattgttgcatatgagctgggtctcttgacaacagataaggttgggctttgcttctttatccaacttgtcattctgtgagttttaagcggggcatttatactgtttacattcacagttaatattggtatttatagctttggtcctaccattatgttgttagctggttattatgcagacttgattgtgtagttactttacaacgtcaatggtctatgtacttaaatgtatttttgtggtggccattaacagtctttcacttccacgcttagcactcccttaaggacctcttgtaaggcatgtctggtggtaacagattccattagcatttgcttgtctgaaaaggatcttacttctccttcacatatgaagtttagtttggctggatattaagttcttggttgaatttttttttttttttttttttttttttttgtgacagagtcttgctctgtccccaggctggagtgtggtggtgttatctcggcttactgcaacctccacctcctgggttaagtgattctcttgcctcagcctcccgagtagctgggactacagacacgcaccaccatgcccagataatttttgtatttttattagagatgaggtttcaccatgttggccaggatggtcttgatctcttgaccttgtgttctgcctccctcagcctcccaaagtgctgggattacaggcatgagccaccacacccagccaagtattttttttttaagaatgctgaaggccgggcatggtggctcacacctgtaatcccagcactttgagaggccgaggtggtcagatcatgaggtcaggaatttgagaccaccctggccaatatggtgaaatcctgtctctactaaaattacaaaaaattgctgggtgttgtggtgcacacctgtagtcccagctacttggaaggctgagggggaagaattgcttgaacccgggaagtggaggttgcagtgagccgagatagcaccagtgcactccagcctgggcaacagagtgatactccgtctcaaaaaaaaaaaaaaagaatgctgaatataggcccccaatttcttttggattgtagagtatcttatagttccactgttagcctgatgggattccctttgtatgtgacctgccccttcattttagctgcctttcatatttttttatttcatgttgaccttggagaatctgatgactctctgtcttggggatggtcatcttgtatagtgtctcacaggattctctgcatttcctggatttaaatggtgacttctctagcaagatttgggaaatttttgtgggcagtatcctcaaatatgttttccaacttgcttgttcttcctccctttctttgagtgatgccttgagtcatatgtttggtctctttacataatctcatatttctcagaggttttgttcattcttttttgttctttattttcatctgactgagttgattcaaagaagtggtctttgagatctgagattctttcctcagcttggtccgttctgctgttagtacttgttattgtattatgaaattcttgaggtgcatttttcagctctatcactttagtttggttatttcttaaaatgcctgtttcatctttaagctcttatgtcatcttattggattccttagattatttggattggattttgactttcttctgaatctcaatgatctttgtttctatccagattctgaattctatgtctgtcatttaatcctggttaacaaccattgttggagagttagtatgattgcttgaagacaggaagacattctggatttttacattgccagagttcttgcactggttctttcacatctgtgtgagctaaggttcctttaatgttttgaatcactgtcctttggatggagttttttccttttttatattctttaatgcccttgagggtttgactgtggcacaaggtagtttcagtcaaatggcttcatttctggaagatttcagggggtaaaggctcagctcagcactcctgaactgcatactctaactttgcaaggctggtaccataccaacagatttgttgtctggcccttcaatgttaagcactgaggtgttcccagtccactggcaacaacactctgatggggtgtgccagccaaagtgcttcattgtagtgattgtagcaaggtccccactcacacatatgtgtcagcagcagcagcacacagcaggtatgcatgtgttggcaggggtgcagtgctggcaggagtgggatgggggtgttctgcatacttgcatgtgtcagccggggcaatggtgttgtggggtgcactcatgtgctgctggagacagagtggcagcatcttcatgagttttatgttatcattctaaatctttaaaaataatgttctagacttctaacaaatgtatttgtgaacccagagaaaaaaagagtattattttgtgcattattacttaatcatatccaagaaaattttactttacaatttgttcttttcactcaacaatagtgttgaggtttatccatctcaagatggatacacatgtagtttattccttttaattgtataagattacattgtatgtcaacagcagattttatttactatgttataacaaaaatagcattttatttgtctcattttatataaatataagtttgtctagaatagttacctgggttacatgaatttttagtttgatgtatactgccaaaatctttttggtatggccactttaatttgccctaataccaatagcttatgagcatacctgttgttcttgaaaatccttgcaaatccttgatattattaaattttataatgttttccagtctgatcattgaaaaaatggcatatttttgttattttagtttgcatttctgtgattattcacaagcttgaatatcttttatatacgtgttgtccttcagcttttccttatctgtaactagcctgttcatatcctttgtccatttttttgttgagttggtcttctttattaattatatctgttatatgcatttgtaaattatatgtattgcaaatatcagtagatatttaattttgtttgtgatgatttttttttcactctaagaagtgtattttgttattttcaacagacagaattgccaatacacaacaccgttcacttgactttgaaaatgaaaaagaaaaagggggagaaagagcagaattgcttttgaagtagtactttattatagtacttttgaagttgcttttgaagtactactttaatataattgaatgtattacaatctctttttatgtctaatgtctttgtatgtatcattcaaaaggtcctttttacctcatgatcacaaatatattattctacatcttttttttgttgttcagagtcttgctgtcacccaggctatagtgcagtggcatgatctcagctcactgcaacttccacctcccaggttcaagtgattctcctgcctcaacctcccaagtagctgggactacaggcatgcaccactgcacccagctattggtttcaccatgttggccaggctgttctcagattcctgatctgtccacctcagcctcccaaagtgctgggattacaggtgtgagccatcaggcctagcccactacattttcttattactacttttccttttgagcttttaacatttattatatgtaaggatctatctatattcctttccacataaatagttatctcaacaccatttgtgaaagatttctttctttctcccactgatttaaaataccaattgtatgatgtaacaaatcccatagatttgtttccacactttgtattctcttttcttccaatttattttgtctttttatatgtcactattattcagttttaactattttacctttacaaaaacagtatcttgttttcttaagtttacttgatctttcattctaagaccttattcttccaaatgaattttataatcagcttgtcaagctcagtataaatccctgcaaagattttgattggtgtatctgattaattcatttgggggagagtttacatctttatattattgaggctttggccaggcatggtggctcacacctataagccaagcactttgggaggccaaggcaggcatatcacttgaggtcaggagttcaagaccagcctggccaaaatgatgaaacaccgtatctactaaaaacaccaaaactagccaggcgtggtgttgagcgatggtaaaattggggctttttagttcacacttgtgaaatgtctccctaagtattcaggtattatcttaattattatattattatattcacaatttttataaaagtatagactgtcttcacagttttgttcttagatactttgtgtttttaattgatgttgtggattaaattctctttgatcacttattcctggggaagccagctgccatgtcctgaggcagccctgtggagaaaaccccactggaaaaaactgaagcctgcaatggctacatgagtaaacttggaagcagatcttctccaccccaccctacctcatgggaaatcttaagtcaaggcatacaactaagccatgcccagattcctgacccacagaagtcataagacaataaatatttgttgttttaagctgctatgtttggggatgacttgttaagcaaaataagaaaaataatacaacaggtgattacaatgtgcagcagagttcaggaaccactgaactagaccagtatgtggttttagagaagtctagtctcttcttgagcccacagggaaatctgtagcataaactgcgccatagagttgtacagccagaagcaaatctcacatcagtacgtcattggcagatgctgtctggagggaaagtagaggggtgcacaacctccctagtattcccaggtaggtgcttgtcagcaggacaaaggttctagaaacctgcagatattagcagccaacaagaagcactgggagatgtgttcatagacctggtaaatggattctggcaggagcaccaaaagcatttctacacaggatatacttcacactttataaagtaaatgtagaagagatgaggtgaatttctggataagatatgccaatagaaagtattctgagcaggagcctccccattcctcatgggtgtcatcaaccactccagaaatgttctcatttgcctttgtaacttaggtggccacacttgttcttttgggcagacaactctgttccttccttccttacttacttatttactcaagaggtaggaaatgtgtggaaggtagatttgtctgaccattcttacagtggtactccaaataatcaactatttggtttccccagaggtctctcctgctcccagcatctgtcatttcagggcttggaccacttttagaagcacatgtatcttttgaggcaattttatttacacacattttggtttatggtttccttttttcaatcctaaattgtctgtctcttatctttctggcatatacttagttacttgtccattgatgattcaccttttgctttctagttaggttatgaatttttctattacctttacatcttcacttctaaggatttaggaatagagggagaggctgcaacctgtgctcagcccaacattttaaacaacgtctgtataaaattttagccagcactaaacaatgcatggaaagttttatcaccattaaattgcattcactcaaatttgaaattcttctaaacaatgtttgttataaatttattataaactacttgtacttataaaacactacttgattaaaaagatgcttttaaattaattttcattcttctttcagttttgttctaggtgctgtctctcctgctgttgttgttctttacacgatggtgttgcaagaaaatggatatggtgttgaggaagacattccaaccttactaatggctgctagcagtatggatgacattctggctctcactggattcaatacatgcttgagcatagtcttctcctcgggtaaacaagaaaatataacaaccaccagatcattcatgaccttttttgttagttctttaaacagggtttctggctttgcttcttcatttattaaccaagactgttcaatttaacatctttttaatctccatagaaagctcattccagaccaaggaagatatttcagtggcttaagataccactacttaacacacatgatctcactttaataatcatatgacaattagtttgataaaccatattattactatttatctgcttatgttgcttttgaattttatcagttctcattagaaaaaattaagcagcagtattatttgtactactaatattttaataggcatttttgaaatgcgcctttttggccatcctaataaacaactggttgctctattataagacaacataaacatacagagctgggacagccatatgcctttttggtagtgttaggacaaaatcctgcaccagttctgattcccaaggtgatatctggtcttgaatatcactacagaaattgtgaaactaaacatttccacatgtagtaatgctttaattatctgcaatgtttgagtcttctgtattattgaagcgctaaactatttttaagttgaaaagtaatatatatagttttatagtttctcttaaaataagaaaatataaataaataagaaaaagaggaaaagttaaaaataaaatctgcaatagtcacatccagaagaaaagaatcatttccttctgaaccttttggtataaatccacccatattcccttcccttcccttcttcccttcttcccttctcttcccttcccctctcctcccccttcccttcccttacccctctctctctgtcaaatattcttataaaaatcagtgaatatttaccaacatgttcttttattatttttttttgaggcggagtcttgctctgtcacccaggttggagtgcagtggcacaatctcggctcactgcatgctctgcctcccgggttcatgccattctcctgcctcaactgcacaagtagttgggactacaggcgcccgccaccacgcccggctaattttttttgtatttttagtagaaccagggtttcaccatgttagccaggatggtcttgatctcctgacctcgtgatccgcctgcctcagcctcccaaagtgctgggattacaggcgtgagccatcgcacccggcctaatatgttcttataaactgaattgttttacacttaactgtatatcacaaacatgtttctttacagtaaatgtatttgtatatcatttttaatagttgtttagcttaatgaaagagtattcaatgtgctgcatcatgattacttatcctgttcaaaattaaagttaactccaatatttactattaaaatgatacgtagttgtgttgctataaaaattttttttaaattaaaaaattggccgggcatggtggctcacacctataatcccagcactttgggaggccaagaagggtggatcacttgaggtcaggagttcaacaccagcctggccaacaaacatggtgaaaccctgtctccactaaaaatacaaaacttagccgggcatgttggtgggcatctgtaatcccagctactcaggaggatgaagcagaagaatcacttgaacccaggaggcggaggctgtagtgagctatccagcctgggcaacagagcaagactctgtctcaaaaaaaattttttaattaaaaaatatacttagttgaacatatagagaaatatttgtacctaatcttcatattttcttaagcttaaaagtgtaattgttgatctaaaatgtatatacatttatgagtgttctgaaacatattgccacaatatcatgtcctacccgggtacataaacttgtcatttcctctcacctctcttcaaaacttggtattactagcctttttcatctttgctaatttgataggtgaaggagggatctctataaatgaagtactttgaatactagtgatgttaaatatccatgtttattagtcattggcattttgtaaattgcttttcttgaaagttttttgcctatttcttttaggtgggttcaccttttattctttttgatttgtcaagattctgcattaaattgagaatgaaaacctttgttttatatactttagttttttcaatttgtaatttggcttttaattttctcactctttttaccattcagaagttaaagttttttattgtcaattgtgaaaatcttttccttcatgattggtatctgtcattctttcaaaaaatattgttatcagtcatgtttccaaaaaatatttccaggctgggcccaatggctcacgcctataatcccaacactttgggaggccaaagcggggggatcacttaaggacatgagttcaagaccagcctggccaacatagcaaagctccatctctactaaaaatacaaaaagttagctgggtgtggtggcacaggcctctaatcacagctactcagggggctgaggcacaagaatcgcttgaacccaagaggcagaggttgcagtgagccaagatcacaccactgcactccagcctgggtgacagagggatactgtctgaaaaaaagaaaaaaagtattcctcttccttttgccagctactatgccaaacactgagaataaacagtaggcaacaacattagcttttattgaatacttgcttgactcttgttctaagttccatatatgtcaccactcatttacaggtaaggaaaccgagaaagatgttaagtaattttctcaaggacagagatccaataagtaggggagccaagatgcaaatctgacagtctccctccacacccacacatttaactcttctcttctccactgcctcccaacacaacagagagacaagatcaaatggtgcatgttctcaaggagcttgtatattaaagaaaaattacaaatgggatgaatattacattgtgaaggttaatattaagtaagtgtcaacttgattggattgaaggatccaaagtattgttcccggttgtgtctgtgagggtgttgccaaaggagattaacatttatttagtggactgggaaaggcagatccaccctcaatgtgggtgggcaccatacaatcagctgccagcatggctagaataaagcaggcagaagaaggtaaggagaagctgacttgctgagccttctggccctcatctttctcccatgctggatgcttcctgcactcaaatatcagactccaggttctttggcttttggactcttggacttcctccagttgttttccaggggctctcaggccttcatccagagactcaaagctggcctgtctgtttccctacttttgaggtgttgggactcagactgagccaatactagattccttgctcctcaacttgcagacggcctgttgtaggacttcactttgtgatggtgtgattcaattctccttaataaactccctttcatatatatatattctattagttctatccctctagagaaccatgactaatacagattttgatactgaggtaatggagtattgctataagatacctgagaatgtggaagtgactttggaactgtgtaatgtgcagactttggaacagttgggaggactcagaagaagatcagaagatgtgggaaagtttggaactgcctagagacttgttgaatggctttgaccaaactgctgatagtgacttggacagtgaagtccaggctgaggaggtccgagatggagatgaacaacttgttgggaactgaagtaaaggtcactcttgctatgctttagcaaagagactggtggcattttgtccttgccctagagatttatggaactttgaaattgagagagatgactgaggacatctggtagaagaaacgtttgttgttgttgttataccttaagttctagggtacatgtgcacaacgtgcatgtttgatacatagctatacatgtgccatgttggtttgctgcacccatcaactcatcatttacattaggtatttctcctaatgctctccctcccccagccctccaccccccaacaggccccagtgtgtgatgttcccagccctgtgtccaagtgatctcattgttcaattcccatctatgagtgagaacatgcgctgtttggttttctgtccttgtgatagttttgctgagaatgatggtttccagcttcatctatctccctgcaaaggacatgaactcatccttttttatggctgcatagtattccatggtgtatatgtgtcacatgtcttaatccagtccatcattaatggacatttgggttggttccaagtctttgctattgttaatagtgccgcaataaacatacatgtgcatgtgtctttatagtagcatgatttataatcctttgggtatatacccagtaacgggattgctgggtcaaatggtaattctagttctagatcctcgaggaatcgccacaatgtctttcacaatggttgaactagtttacactcccaccaacagtgtaaaagctttcctatttctccatatcttctccagcatctgttgtttcctgactttttaatgattgccattctaactggggtgagatggtatctcattgtggttttgatttgcatttctctgatgaccagtgatggtgagctttttttcttgtgtctgttagctgcatagatgtcttctttggagaagtgtctattcatatctttgcccactttttgatgggttgtttttttcttgtaaatttgtttgaattctttctttgtcaaatgggtagattgcaatttatctcccgttctgtatgttgcctggttcactctgatggcagtttcttttgctggaagctctttagtttaattaaatcccatttgtcaattttggcttttgttgccattgcttttggtgttttagtcatgaagtccttgctcatgcctatggcctgaatggtattgcctaggttttattctagggtttttatggttttaggtctaacatttaagtctttaatccatcttgaattaatttttgtataagatgtaaggaagggatccagtttcagctttgtacatatggctagctagttttcccagcatcatttattaaataggcaatcctttccccatttcttgtttttgtcaggtttgtcaaatatcagatggctgtagatgtgtggttttacttctgaggcctctgttctgttccattggtctatatatctgttttggcaccagtaccatgctgttttggttactgtagccttgtagtatagtttgaagtcaggtagtgtgatgcctccagctttgttctttttgcttaggactgtcttggcaatgcaggttcttttttgtttccatatgaactttaaagtagtttttttccaattctgtgaagaaagtcattagtagcttgatggggatgatattgaatctataaattactttgtgcagtatggccattttcatgatattgattcttcctatccatgagtgtggaatattcttccatttgtttgtgtcctcttttaattcgttgagcagtggtttgtagttctccttgaagaggtccttcatgtcccttgtaagttggattcctaggtattttattctctttgtagcaattgtgaatggaagttcactcatgatttggctctctgtttgtctattaatggtgtataggaatgcttgtgatttttacacattgattttgtatcctgagactttgctgaagttgcttatcagcttaaggagattttgggctgagaaggtggggttttctaaatatacaaacatgtcatctgcaaacagggacaatttgacttcatcttttcctaactgaataccatttatttctttctcctacctgattccactggtcagaacttccaacaccatgttgaataagagtggtgagagagggcatccttgtcttgtgctggttttcaaaaggaatgcttccagtttttgcccattcagtatgatattgtctgtgggtttgtcataaatagctcttattattttgagatacgtcccatcaatacctagtttattgagagtttttagcatgaaggagtgttgaattttgtcaaaggccttttctgcatctattgagataatcatgtggtttttgtctttggttctgtttatgtaatggattatgtttattgatttgcatatgttgaaccagccttgcatcccagggatgaagcccacttggtcatggtgaataagctttttgatgtgctgctggattcagtttgccagtattttattgaggatttttgcatcaatgttcatcaaggatattggtctaaaattctctttttttgttgtgtctctgccaggctttggtaccaggatgatgctggcctcataaaatgagttagggaggattccctattgttctttttttgttttttggatgaaaaaagaactgtttaatttttttgatgttttcaatgttgatattttttccaagaattagagaaatatctctggatggttatctaaaatttataatttttttaccggtatggtatgtaggagagtgtcatagtttttctattattatactttaagttctagggtacatgtgcacaatgtgccagtttgttacatatgtatacatgtgtcatgttggtgtgctgcacccattaactcgtcatttacattagatgtatctcctaatgctatcccccctccccccactccatgacaggccccagtgtgtgatgttccccaccctgtgtccaagtgttctcattgttcaattcccacctatgagtgagaacatgtggtgtttagttttctgtccttgcgatagttttttcagaatgatggtttctagcttcatccatgtccttacaaaggacatgaactcatcctttttatggctgcatagtattccatggtgtatatgtgccacattttcttaatccagtctatcattgatggacatttaggttggctccaagtctttgctattgtgaatagtgccgcaataaacatacatgtgcatgtgtctttatagcagcatgattcacaatcctttgggtgtatgcccagtaatgggatggctgggtgaaatggtatttctagttctagatccttgaggaattgccacactgccttctacaatgattgaactagtttacactcccactaacagtgtaaaagccttcctatttctccatatcctctccagcacctgttgtttcctgaccttttaatgatcaccattctaattggtgtgagatggtatctcattgtggttttgatttgcatttctctgatggccagtgatgatgagcattttttcatgtgtctgttggctgcatagatgtcttcttttgagaagtcactgttcataccctttgcccactttttgatggggtagtttgattttttcatataaatttgtttaagttctttgtagattctggatattagccctttgtcagaggggtagattgtaaaaattttctcccattctgtaggttgtctgttcactctgatggtagtttcttttgctgtgcagaagctcttgaatttaattcgatctcatttgtcaattttggcttttgttgccattgctattggtgttttagtcatgaattccttgcccatgcctatgtcctgaatggtattgcctaggtattcttctagggtttttatggttttaggtctgatatttaagtctttaatccatcttgaattactttttatataaggtgtaaggaagggatccagtttcagctttccacatatggctagccagttttcccagcaccatttattaaatagggaatcctttccccgtttcttgtttatgtcaggtttgtcaaagatcagatggttgtagatgtgtggtattatttccgagggctctattctgtttcattggtctgtatctctgttttggcaccagtaccatgctgttttggttactgtagccttgtagtgtagtttgaagtcaggtagtgtgatgcctccaggtttgttctttttgcttaggattgacttggcaatgcaggttcttttttggttccatatgatctttaaagttgttttttccaattctgtgaagaaagccattggtagcttgatggggatgacattgaatttataaattacctttggctgtatggccattttcacgatattgattcttcctatccatgagcatggaatgttcctccatttgtttgtatcctcttttattttgttgagcagtggtttgtagttctccttgaagaggtccttcacatcccttgtaagttggattcctaggtattttattctctttgaagcaattgtgaatgggagttcactcatgatttggctctctgtttgtctgttatcagtgtataggaatgcttgtgatttttgcacattgattttgtatcctgagactttgctgaagttgcttttcagcttaaggagattttgggctgagacggtggggttttctaaatatacaatcatgtcatctgcagacagggacaatttgacttcttcttttcctaattgaataccctttatttcattctcttgcctgattgccctggccagaacttccaagacaatgttaaataggagtggtgagagagggaatccttgtcttgtgccaggtttcaaagggaatgcttccagttattgtccattcagtatgatattggctgtgggtttgtcataaatagctcttattattttgagatacgtcccatcaatacctagtttattgagagttcttagcatgaaggctgttgaattttgtcaaaggccttttctgcatctattaagataatcatgtggtttttgtctttggttctgtttatatgatggattacgtttattgatttgcatatattgaacaagtcttgcatcctagggatgccaacttgatcatggtggataagctttttgatgtgctgctggattcagtttgttagtatcttatcgaggatatttgcatcaatgttcatcagggattttggtctaaaattctctttttttgttgttgtgtctctgtcaggctttggtatcaggatgatgttgccctcataaaatgaattagggaggattctgtctttttctattgattggaaaagtttcagaaagaatggtaccagctcctctttgtacctctggtagagctcagctgtgaatccatctggtcctggacttttttttgttggtaggctattaattattgcctcaatttcagagcctgttattggtctattcagagattcaacttcttcctggtttagtcttgcaagggtgtatgtgtcccagaatttatacatttcttctagatgttcaagtttatttgtgtagaggtgttcatagtattctctgatggtagttttatttccctgggctcagtggtgatatcccctttatcatttttattgcatctatttgattcctctctcttttcttctttattagtcttgctagcagtctatcaattttgttgatcctttcaaaaaaccagctcctggattcattgcttttttgaagggttttttgtgtctctgtctccttcagctttgctctgatcttattttttgccttctgctagcttttgaatatgtttgctcttgcttctctagttcttttaattgtgatgttagggggtcaattttagatctttcctgctttctcttgtgggcatttagtgctataaatttccccctacacactgctttaaatgtgtcccagagattctggtacattgtgtctttgttctcattggtttcaaagaacatctttatttctgccttcattttgttatttacccagtagtcattcaggagcaaattgttcagtttccatgtagttgttcagttttgagtgagcttcttaatcctaagttcgaatttgattgcactgtggtctgagagacagtgtgttgtgatttctgttcttttacatttggtgaggagtgctttacttccagttatgtggtcaaatttagaataagtgagatttggtgctgagaagaatgtatactctgttgatttggggtggagagttctgtggatgtctattgggtctgtttgttgcagagctgatttcaggtcctggatatcttttttaaccttctgtcttgttgatctttctaatattgacagttgggtgttaagtctccctttattattgtgtgggagtctaagtctctttgtaagtctctaaggacttgctttaagaatctgggtgctcttgtattgggtgcatatatatttaggatagttagctcttcttgttgcattgatccctttaccattatgtaatggccttctttgtctcttttgatctttgttggtttaaagtctgttttatcagagacaaggattgcaaaccctgcctttttttgttttccgttttcttggtagatcttcctccatccctttattttgaacctatgtgtgaatttgcgcatgagttgggtctcctgaatacagcacactgatgggtcttgactctttatccaatttgccagtctgtgtcctttaatttgggcatttagcccatttacatttacagttaatattgttatgtgtgaatttgatcctgtcattatgatattcgctggttatttgcccgttaattgatgcagtttcttcctagcattgatggtctttacaacttggcatgtttttgcagtggctggtaccgggtgtttctttccatgtttagtgcttccttcaagagctcttgtaaggcaggcctggtggtgacaaaatctctcagcatttgcttgtcagtaaagaattttattttctccttcacttatgaagcttagtttggctggatatgaaactctggattgaaaattattttctttaagaatgttgaatattggctcccactctcttctggattgtagggtttctgccaagagatcagctgttagtctgatgggcttccctttgtggctaacctgacctttctctctggctgcccttaacactttttcctacacttcaaccttggtgaatctgacaattatgtgtcttggaatcgctcttctcaaagagtatctttgtgttgttctctgtatttcctgaagttgaatgttggcctgccatgctaggttggggaaattctcctggataatatcctgaagagtgttttacaacttggttccattctcctcatcactttccagtgcaccaatcaaatatagatttggtcttttcacatggtcccatatttcttggaggctttcttcatttctttttactcttgtttctctaaccttgtcttctcactttatttcatttatttgatcttcaatcactgataccctttcttccacttgattgaatcggctattgaagattgtgcatgcatcacaaagttctggtgccatggttttcagctcctttgggtcacttaaggtcttctctacactgtttattcttgtatgccattcgtcaaatcttttttcaaggtttttagcttccttgcaatgggttccaacatcctcctttagctcagagaagtttgttattaccaaccttctgaagcctacttctgtcaactcgtcaaagtcattctctgtccagctttgttccgttgctgacaaggagctgtgatcctttggaggagaagaggtgctctgatttttagagttttcagcttttctgctctggtttatccctatccttctgattttatctacctttggtctttgatattcttgacctacagatggggttttggtgtagatgatcttctgttaatgttgacactattcctttctgttttttagttttccttctgacagtcaggaccctcagctgcagttctgttggagtttgctggagttccactccagacactgtttgcctgggtatcaccagtggaggctgcagaacagcaaatattgcagaacagcaaatattgctgcctgatccttcctctggaagcttcgtccaagaggggtagccgtctatatgaggtgtctgtcagcccctactgggaggtgtgtcccagttaggctacacaggggtcagggacctacttgaggaggcagtctgtccattctcagaactcaaacgccatgctggaaaaaccactgctctcttcagagctgtcagacagggatgtttaagtctgcagaagttgctgccttttgttcagctatccctgcccacagatgtggagtctagaggcaatgggccctgttgagctgcggtgggctccacccagttcaatcttccctggccactttgttcacctacttaagcctcagcaatggtggacgcccctcccccagccaggctgccacctcacagatggatttcagactgttgtgcgtgtgggtgtgggacccactgagccaggcacaggagagaatcacgttgtctgctagttgctaagaccttgggaaaagtgcagtatttgggtgggagtgccctgtttttccaggtagtctgtcacagcttcccttggcaaggaaagggaaatcccccaaccccttgtgcttcccgggtgaggcgatgacccaccctgcttcagctcaccctctgtgggcctgcacgcactctccaaccagtgctgatgagatgaaccaggtacctcagttggaagtgcagaaatcacctgtcttctgtgtcgatcgttctgggagctgcagaccggaactgttcctgtttggccatcttggaacccatccaggacatctggtagaagaaatttgtaagcagcaaagtgttcaatttatgacctgagtgctcttaaaagtgttcagttttatgcactcacaaaaatatggtttggaattagaacttatgtttaaaagggagcagagcataaaaatttggaagatttgcagcctgatgatgtgatagaaaagaaaacccattttctggggagaaattcaagctgactgcagaaatttgcaaaattaacaaggagccaaatgttaattgaaaagataatggggaaattgtctccagggcatgtcagagttcttcacgacagcccctcccatcacagggttggaggcctaggagggaaaaaatggttttgtgggccaggcccagaactttgctgctctgtgcagtcttgggacttggtgccgtgtgtcccagccatggctaaaaggagccaatgtacagctcaggctattgcttcagagttcaatccccaagccttggcatcttccacatagtgttgggttgatatgctagttggccatttgtatttttttttagaaaaaatgtctattcaagtctatcttagtccattcctgctgctataacaaaataccttaggctggtaatttataaaaaacagaaatttatttcttgcattctggaatgtgagaagtccaagatttaggctacagcagactcagtgactggtgaggtcactatattcactatacatagcaccttctctgtgtcctcacgtgttcaaaaggcaaaacaaactcccttaagcctcttttataaaggccctagtcccatttctgagggctatgacttcatgaacttatcatctccaaaatgccccacctcttaatattatcacattgaatattagtctccagcatatgaatattgggagaacatttggaccatagcaaagtcaactgaccatttctcatataggttgttttgttattgagttgttattctgcatatattttagatattaaccccttatcaggtatgtggtttcctgggaggtttttgattcctgattcagttactagttataggtttattaagattttttattttgtgacttagtcttggtaacttgcatgttactaggaatctgttcatttctcctaggttatccaacttgtcagtatataatcattcatagtagactcttagaatcctttttatttctgtaatatctgttgcagtgtcttctcttttgttcctaaaagaagttgagtcttctttattttttttcttaaatattctagctaatgatttgtcaattttgttgaactttaaaacaactactagtttcattgggttttttctattctctagccttttattttattttattttattttattttgagatggagttttgctcttattgcctaggctgtagtgtaatggcgtgatctccgctcgctgcaacctctgcctcccagttcaagtgactctcctgcctcagcctccagagtagctgggattacaggcatgcaccaccatgcccggctaattttgtattttttagtagagacagatttctccatgttgctgaggctggtctcaaactcccgacctcaggtgatccacctgcctcggcctcccaaagtgctgggattagagtcatgagccactgcaactgaccttctgctctagactttattatttccttccttttgctaacattgggttgagttcttctttttccagtttcttgaggtgtaaagctaagttgctgattttagatctttcttcttttttaaggtaggtagttagatacataaactgtcctcttcacattcattttgctgtatcccacaagctttggaatgttgtgtttccatttttatttctctcaagacattttataattttccttgtgacttattctttgactatgtattaatcagagttctccagagggtcagatccaataggagatatagatatagatatagatatagatatagataatagatatagatacatatacatgtatctaaaagagaatatatttatatatatatgaaatataatttattaaggagaattggctcacataattacaaaggcaaagtcccacaataggccatctataagctggaaaatgagagaagcctacagcatggctcccaaggaaggcagtgacatggctcagtccaaatctggaagtctcaaaaccagggaagctgacagtgcagccactagtctgaggcccaaggcctgagagctcccaaaaggctgctgatgcaagtcccagggtcctaagactcaggccaaagaacctagagtttgatgtgcaagggcaagaggagaaaaaggcatactgctctggaagagagagaaagtgcataaaacagaaatctaagcaagctgaatgtttccattcttctgcctttttgttctagtcacacttgcaaccaattgcatgttgcctacccacaatgaggatggatttttctctctcagtccactaactcatccatcattctcctgtggcagcaccctcacagatatacccacacacagtgcttcatcaggcatctaagcatccctcaatcaaattgacaattaatattaaccacacaggccaattggttaagagagtatatttttgtaatttccacgtatttattacttttcctttttccttctgctatgaatttgtaatttcatttaatgtggtcagaaaagatatttggtatgagttcagttttcttaattttttaaaaacttgtttgtggactagcatgccatctatcctggaaaatcttggtatgtacttgagaagaaagcatattttgccattattgggtgaagtgttctgtatatgtcagacaggtccaattggtctacaatgttgctcaagttctgtgttttccagttgatctgtctggttattgtatccataattgaaagtggaatattgaagttttctgttattatgatgttgttatctatgttacccctcaattctgtctatgttagcttcatatatttagatgctgcactgttagttgcatatacatttataattgctatatcttcttggtcaattggcccttttattattatgtaatatccttgtctcttgtgctattatttgacttaaactctattttgtctaagtatggccatccttgttctcttttggttaccaaatgcattgaatatctttttccatcctttcactttcaacctttgtgtgtgtttagatctaacataagtctcttgcatatagtatatgtttagatttttttaatccattcgggcaattctctgtcttttgattggaaaattagcctatttgcatttaaagtagttactgatagagaggggcttactattgtcattttgttcattgttttatacatgtcttgcaggtatttttttccacttttcctctctttctgcctccctttatgtttcactgatttctttttttggtagggatgtgctttggttcctttctcatttttatttgtgtatcttctgtaggtcttttctttgtggttactgtagaattacatgaaaacatcttatagttataataatctattttaaattgacaacaacttaagtttaatcacatacaaaaactctacttatttacacctccttctcactttgttatcaatgtcacaaaatatatattttatattgtttattcacataatttaatacagtaatattatgcttttaccttttaaattctatgcttcaattaaaagtgaattacaggctaggtgttgtgtctcacacctgtagtcccagcactttgagaggccaaaatgggaggatcgcttgagcctaggagtttgagaccagcaaggccttatctctgctaaaaatttaaaaatattatctgagtgtggtggtgcatgtctgtagtcccagccactcgggaggctgaggtgggaggatagctttagcccatgactgcaaggctgcagtgagccatgatcaaaccactgcactccagcctgggcaacagagcaagactttgtctcaaaaaaaaaaagtaaaggaaaaaaagtgttttgcttaccaccattagagtattaaaggattctatgttcactcatatatttacctttaccaaagaagtttatattttatatgtttttgtatttctatccaatgccttttcatttccacttggaggactccctttaacattttttgtaaggtaggtctagtggtgatcaactccctcaccttttacttctctggggaactctttgtttgtccttcacttttgaagtagagttttactggctatacagttcttggttgacagttttttttttctttcagcccttttaatataccaccccattctcttctggcctgtagagtttttgctgagaattccattgattaccatatggcatctcccttgtatgtgacaagttgctttgatcctgttcctttcaaaattctctctttgtctttgacttttgacagtttgattgtaatgtgtctcattgtaggtcttttgcaaattatccaacttggagttctttgagcctcttggatttgtatgtccatttccttctttaagtttgagaagtttttggtcattatttttttaactggctctctgccgctttatttttctcttctccttctggcactttcataatgcatacattggtctgcttgatggcatcctgtaagtctcttaggctgtcttcactcttcactccttttcccttttgctcctctgactctataatttcagatgactagtcttccgtttcactgattctttcttctgcttgatgttattgaaactgcctttgcaaaaattataactgaagaaattatgacagcaaaagacatcagacttaatcaactccatctcgcttctagcatttaaactgtccttgttcattcctggcagtaggatgaactaattttgggaaggtattcagttcatggtttgactctgaaacaaagttgataataaccatttcccaaaaagatccccttcttgcctggaaccagtctgcctttgcaggataaacacattagctataacattagaaattacagttgaggggttatgcagcctctggctccaagagtctaaacctctccaaattgctcctggggataacatcactattgtaaaacctaaaatcagtgcttgagatattttgcagaccctgcactggatgaatcagctgacaccacccagactggtaatatggctcaactagttctgccaccccacccacaaacagaagacagcaagaaaacatcacttcaaccccgtctgatttcatctccaacctgatgaataagcagtccccacttcccaagcccctacctgccaaattatctttaaaagttctgatccccgaatgctcagggagactgatttgagtagtaataaaattctgatctcccgcacagccagctctgcctgaattactctttctccattgcaattcccctgtcttgataaatcagctctgtctaagcaggacacgaggtgaacccattgggcagttacacagtctattggtgatttccgatagtgaatttttcaattgagctattgtattccttagctccagattttctgtatgattcctttttttttttttagtttctatctctgttaatattttcattttgttcatgaattatttcctgctttcacttagttgtctatttctgttgtcactgggcttcattaagagagttaatttggattctttgtcaggtaactgatttatctatttctttagggttggtttctggagatttattttgctcctttaatttagtcatcagatttctctgtttcttcttatgtcttgttattttttattttttatttatttttgccaagatttgggcgtttgaaaaaactgccacttctcccagtttttatcagctggcttcatacggaagaacttcatacctgaatcagcatggctataggttccagcagcctctcaaactttttctgggaatgcatcttctttgggtttatacattgcaatatcccaagtagaggtttgccagtttctttttctggagctgttgctccctctggtatctgtctgtggtactgcaggttccctggtgctgcatcatctctgacctctcctttattcccagtggctcccatgcatccaaggtatgccagttgggcgtcaagttagagagagagagagagcttcaggtaacctcataaaactattccgttccagtcttctctttccctgctaacggagaagctgcaagttgagtgcttcccagccaaaccaacctgttcgagcttggggaaggggtatcatgagtataatgcaacagcttttcttatttgttcaatgccactattcttggctttgcacttgtctgtgctactacaacttcttaatggtttatggaactccataaaggcttttagaccatatattgtttttcagttgctatctttatggagaatcaaggtttggagtcattccaccacctggctgacatcactctgtttatattattttttacttttattatactttattttcttgagacaggatcttgctctgtcagccaggctagagtgcagcctcgaactcctgagctcaagggacctcctccctcaggctactgagtacttggactataggcacacaccacataccgggctaatttcttattttcttgtgaagatggggtttcactatgttgcccaagttggtatcaactcttgggctcaagcaatccttctgccttggcctcccaaagtgctaggattaaaggtgtgagcccaccatgcgctgcctgttatatttagtagaaaatatatctaaaaatatacttacgtactctattgaatccactacccagagcttaactgaactatttttgtgactcattctgttttttttattttttgctttttacttattacaatgaactacaagtatggatatattaatattaattaatataaaatatactggaatcttttgtattttttttccttttttcttcaccaaaagcagaaacttaaacatactgaaatcttaaatgaccattgaatgtttctaggactgaccctggaacaaaattttttatgttgttattacattgttcttttcatgtttaaatcatttgtttctttttcatgtagtacatcaaagaagaattgttgatatagcccttaccagccatatgctaagtgccacaagtgtttcggtctctctcaattcttgtacctcacttggtcttttttttttttcctttgggggtgtagcctccgtctttcacccaggctggagtggggtggcacgatctcagctcactgcaacctctgcctcccgggttcaagtgattctcctccctcagcctcctgagaacctgggaccacagttgtgtgtcaccatgcccacctaatttttgtatttttagtagagatggggtttcattatgttggtcaggctggtcttgaactcctgacctcaagtaatccaccctcctcagcctcccaaagcgctgggattacagacatgagccactgcacctggactacctcactctgtcttttaaattggctatgtaaggggagcatcttgtgcttgttaagtctttgttttctggcctatttatataatggacatttctgagttgtgtgtatatattaaattatttgagagtatatatttaatgtactaaatagagctaagtgttttcatacatgtcactataaaaggaccatttgcatatatttgttctataaaatgcttacttttcttcatgaaccacctagatttgcttttctgatgtgtagtgtatgtgaaaatatttctttgtgttttttttttattgtgtgcccctacaggtggtatgcttaataacgccatagcctctatagggaacgtatgtattagtctgctggcagtaattgttttgggactttttgttcgatattttccaagtgaagaccaggtaaatacaaaatctattttatagaagtatagtattagacatttttttcaaaatattaaactttggtaagatccatgaaatttagtacttaactctatttttctaaaactagcctccaatgcctactctgtatttaaaactgagcacagcagtgattgatacaggtcaatggctttgattaaagtctctgcttcctgatttggcaaataaggaatgtcaaaaaatatacttaatgcagagtatccctctgaattatactttccctttctctactaaattgtctattgatgtttgataatttcccccaaattttcccttaaacattttagggggagataggttcccatttatttctgcatattttctgactgaaattcactcctgctatcctttgacaaaggcaacactcaaacttagccatttcctgccttaaaggaaaacatgccattacttttgtatttctgtaatttccatccaaatttagctgtaacatattgaccaaagagatattcaaatattttttaagaattcactggatatgttatatgaaattggagattttatgggtctcttttcttcttcacttaaagtaacactttaaccattttactgatactagtatcagagatgtggcagaagatgaaacgttactaattggaaattttgttacttggtagtaagtctgctaaaatgtatggtgagaaagaaaatcaaaattttagacatttaatataacatttaaagacataatatcaaagggtcaaacatatataatagataatgtcaaatcttgtattatatatttaatataaactaatttctaaatatctatctaattctagaaaaaacttacattgaagagaggattccttgttttgactacgtgtgtttctgctgtcttaggcagccaacatattggtttacatggatctggaggattatgcacactagtgttgagtttcattgcagggacaaaatggtcccaagaaaaggtgaatatttttaatatgctatattttaaaagctaagacaactgaattttttacatatatttaggaaatcccctcattctggttggaaaatattccaaaaggtttgctatcctcaagaaagtgtatgaatcaatcgaggaaataaaatatttaggaaaagcagctggaaatatactaatatggaatcagaagttgagttaatcacatcaggcttctctttttcccaagttttatataatattattatattacttatatcaatctaattattgtattcattgaaattttaattatacaattaatccatgaagaatgtttgtaaaaggccaggcacagtggctcatgcctgtaatcccagaactttgggaggtcgaggtggacagatcacctggggtcaggagtttgagaccagcgtggccaacatggtgaaaccccatctctactaaaaatacaaaaattagctgggcatggtggcgtggtggtgggcacctgtaattccagccactcaggaggctgaggcaggagcattgcttgaacccaggaggtggaggctgcagtgagccgagatcatgccattgcactccaggctgggcaacaagtgcaaaactccatcacacacaaaaaaaataataataaacaaataaataataaaaatagaaatgcttgtaaaagaaagatttctttattccccaccactgtcaaatatctaacccccttacatttttttaagtaaccagtattctatttatagacattaagatcgtttccacttttagttatttacaaacagtgctgtcataaacagtgttgttcatgtcttttttttttttttttgagacacagtttcactcttgtcacccaggctggagtgcggtagcataatcttggctcactgcaacctccacctcctggattcaagtgattcttctatttcagcctccctagtagctgggaatacaggcgcgcaccaccacgcccagcaaatttttgtatttttagtagagacggggtttcaccatgttggccaggcaggtcttgaactcctgacctcaggtgatactcttgcctcggcctcccaaagtgttgggattacaggttcatctgtaggaatagagtcctagaaatgattttttttttttttttgagacagagtctctgtctatgttgcccaggctggtctcaaaatcctgagctcaagggatcctcccatcttgacattgcaaagtgctaggattacaagcatgagctaccacacctggctggaaatgatctgtgttttattttgatggacactgctaaattatcccttcaaaaattttggttatttacactctgccaacagtgcacaaaaatatctaatactttaactcatcaacagcacttgatattatcactagttctattctttttactattaaatgacctcaccatccaattcttatagtttcttacaattatgtgatgttgttattctttatttacatttctctgattagtagtatagtaagcttctcttcatatattctttttaaaatacctatgatcttctttgaccatttttattgggttatttatttttttgtttctaatttatagtttctcttagtgttagggctactgatcctttgttatgtatatattgcatataatttttgcttatcttcaactttgtttatggtttctggtgtaggaaagtaaaatttcctatgaccaaacctattgggttttcctgttttggttttggattctgcatctcatttaagaaggactttctcactgaagattataacgtataaacattacaaagatatactattttgtgtattatcatttaatattttggtagtttttgtttgtttaatttgtttttttatttagtcttttaatctatctggaatttatctttgtgaatgctgtgaggtaaggtaataatatatacatatgtgtatcttacaaactatatatatatatgtacacacacacatacagtttgtaagttaactgaacagagatagaactacatcatgcctgatgtgtgtgtgtgtatatatatatatatatacacacataaatataaatgcatattcagacacacatatatacttgcatgtgatgaatatgtacatacagatatatgcacataaactagacagtcattttttgccaaattgtttatttattgaccaattcattaataattcagttttttaacatgaactaaattctcccatatatattaattctgaagtctatttaatcctacttctctatttctatgccaacactactgttttaaatcactgcagttttatgtgtcaaaatctaatatagattatacttctttttaaagtatttttggctgttcctacacatattctttcttagataaattttagaatcagcttgagaagttccctaatcaaaaatcatagtggcattttgcttagtattcttatataatcataattataaaagaaatgaaatgaatgaaatgcaaatcaataaataaaattaaaactgctagaatttttttaaatggtaaaagaaacagaactaaaacaagttttaaagattaaaagtaacaaataggataattatactgtaaagagtagtaacatcgtttttctttgtttttctttttttaaactataataagtggggatcagaaaacacagtcataagggaaatagttatgaagatagtttatgcctcaaggaagagacatcaaagttcttatgtatcttctgtttaaaaaaaaaaattaaacccagactgagactgaaatctcttcatccaaattcctggagaagagccagagtaatgtaggccaataggggactttcctgtaatcttttaattggggaagtagcactgggaggcattcatttccagaaagggaagctgggtaggcagctaaatgagaatctaatatatgttttggttttgttttaaggaaaaagtaactttaaagtattcaacatgggttttttggaagcaggcctagcagacttccaaattgtttttcctagtagtatacactatatatatcaggattcactttaatgggattgagttccaggatggttgttagtggaaggcttcccaacccccttctgagaacccaaatgtttgcatgaactgggtatgttctcatcaggcatgatgtagttctatctctgttcagttaacttagagacaaaatctggaactcatatgaaacatggctagaaccctaaggacatcacttattctgtgacaaaatggccaaatagtattattttattgctttgtgagtttcttttaatcaaattctacctaagtgtttgagtaaaactattgaagtgttcagtttttattaattaagtttaacatttttattaaaataaagtatcttaaatttattaactgttaagtgactttaggtcaggcatggtggctctttctataatgccagtgctttgagaggccacagccagagaccacttgaagacaggagttctagaccatcctgggcaatatagcgagaccccatctctataaacaatttaaaaattagcccagcatggtggtacacacctgtagttctacttgggagactgcgagaggattacttgagcccaggagttcaaggctacagtgagctaagattatgccactacactccagcctgggcaacagagcaagaccgcatctctaaaatacttaaaaagtgaaaaaaaaaaggtgagggagactttaactttctgaaatttatttatgtgccaaaataattataaatgtatttctcttttctatagatgaaagtccgaaagattattacaaatgtatgggatatttttcaaccacttctttttggtttagttggagcagaagtatctgtttcactgcttgaatcaaatattgttggtaagaataattagagcacaaaaaatatgaaattcaaaaatatttaagaaaattataaatacatttatttttatttacaatatatctttgaatggctacaaggaccttcttcagaaacacatgttgatacactgtcatattttcctattgctcttcctttacactgtgtgctctttttttttaaaccaaggacagccctgaatatcttccctgagttttctaaggaaataaatataagatttctttcctgagggaacatatttgatatgatcagcactttttgagtactttcatttaaaactattggctgggtgtggtggctcatgcctgtaatcttagcactctgggaggccgaagcgggcggatttcttaaagttaggagttcaagacctgcctagctaacatggggaaccccatctctcctagaaatacaaaaattagccaggtgtggtagtgcgcacctgtaatcccagctactcaggaggctgaggcaggagaatcacgtgaacccgggagttggaagttgcagtgagctgagattgtaccactgcactccagcctgggtgacagagcaagaatccttctcaaaaagtaaattattattaataataataaaagtattcaaaaaaagtctattagttcagaattgtataaatgtcatctgtcttatttttcatggtacctccaccgtcagatactgtcttgcattttacagagaatcctccatcatattcatttttattatcattgttttatgtaaaaattaaacacatgaagagacaatagccttaaaatgcttttaaaagttttagaaatcatattcctgggcataaagaacacttcttcacaaatattttgttatttatgtttgttttcatctgttgtaggcatatctgttgccactctgagtttggcattatgtgttcgaattttaaccacatatctattgatgtgctttgctggttttagttttaaggagaaaatatttattgctttagcatggatgcccaaatatgtacaggtaagaacatattaagcctattgcttaatgctttcgttttgatgcttttaaaatttaaaatgaaaaatgttactccaatcacaaaatatgagctattatccttactttttaaatgtttgattgatcataactattcattaaaattaacgtaaccagtcccagctactcaggaggctgagacgggagaattgcttgaacccaggaggcggaggtcacaataagctgagatggcaccactgtactccagtctgggagacagagcaagactcaatctcaaaaaaataaataagtaaacaaaaacaaacaaagaaactcaatgtaacctttttctatttttattttcattttgggaccaggtctcactctgtcacccaaactggagtgcagtggcatgatcatggctcactgcagcctcaaccacctgggctcaaacaatcctctcacatcagcctcctgagtagctaggatcacagtcacctgccaccacacccaactgcttttttttcagatttttttttttttttgagacagtcttactctgttgcccaggctggagtgcagtggcatgatctcaggtcaatgcaacctccacctcccaggttcaagcgattctcctgcctcggcctcctcagtagctgggattacaggtgcacaccaccatacccagctaatttttttattttttgtggatatggggtctcaccatgttggccaggctagtctcaaactcctgacctcaagtgatccgcctgcctcagcctcccaaagtgctgggattacaggcatgagccacagtgcctggtcttttctttatgatttttttgtaaagaggaggtcttgctatgttgcccgggctgatcttgaactcctaggttcaagtgaccttcctgtctcagcctcctaaagttctgagattacaggcataacccactgggcccagccaacgtaaccttttgaaatctcagttttaaaagcaattattttgaaatcaaaaagtattctttcaataagtacttcctaagtttatgaaaatatgttttttattttcctaaaatatataataagaatatatctgaaaattggagtttttatattttgctgaatataacaaagctaaatgttacaattttaaaaagtagagacacaggccaggcattgtggctcatgcctgtaatcctagcacttcaggaggctgaggcaggcagatcacttgagctcaggagttcaagaccagcctgggcaacatggtaatacccccgtctctacaaaaaatacaaaaaaattagtcagatgtggtgacacgcatctgtagtcacatctactggggggctgagggaggaggattgcttgaacttgggaggttgaggctgcagtgagctgaggtcacgccacatcactccagcttgggtgacaaagtgagaccctgtcacaaaaaaaagtaaagtaaaatagagaaacattgattttttaaaaaatacttttcctacctttccactcactccatcacacaaatgcacatatatttttttaattacacatttatttgtatactatttggttaatggctaaatccctgcccccgcccctttgatagactatgtaaggacagggacagtgtctggttgttgcagttgtttttcattatttctccctggcacttaacacagtgcctgacatgcaggaggcaaatacgtattgcatgcctgcaaggatgaatgaacggaaagggaaaccttgtaattttgccctgttattcaaggagattctcctcctactaaaatatattgctacttcttgtcagactgtttaacttggcagcataatatagcttaatttcctgtggctcttttcttagttgttattccaaaacagaagctcctaaattttcatgcaaaaaaacctctattatgttagaaaagcaggctcagagggccagactacctgttttgaataccatgttacttgcctataacctcaggaaaattattttctagtctctcagtccttcagtgttctcatcttacaatgaagtctatgactgtatctgtttcttagcagtgttgtcaggattcaatgagataatccacgtaaagtgcttaacactctctctggcatatggtggtgctcagttaacaaacaatgttgttattttatcttaccttcaagtaatataaataataactttttatttttaatgtctactgtagggaataataaatctacaaaaggagtaactgttctctctccttccaacaatactcttgcaattttgtttcattatttcataattttcataaagcagggaaaaaagaaaagcaggtaggaggaaagagaccactcactcgagtcctgcagtattattctgcttctgcctattcctgtctgctggctccaggctagcttctacacaaagaatatcaagctggttccaggaactggcaagacataaaaaattaattagttatacaagtagagtcacaacagcaataatagataacaataatgtcacaagtaaatacgatcaacaaatatttaaatttcaattttaaattattttcacctttatcctcttctgccgttctctgctgctaaaataaaattggctaaggttcagctttctcttattccttagttttgagttactgataaaaattagactggaaaaatagaagctattaggagagtaaataaataatttagtttacaaatgtaagatcagcttggcaattggatttttttaaagaaataatattaaatctcagtcactaggaggaaatcatttatcatctaataaaagtcctcacataataaggttgtcataaaaattaaatgaattgataaatggaaagctttaagaatgatacctgacatatgatgaatgccatataactataaaaatattatttctagtttcaccattatcgtcatcatctcctaaaagtcaatgggtttggtttttgtttttttttttttctgttggcagttcttttatgttcaaatcctcttctaaactgtaagattctttcaaggtggttttctgcatgattatttttttctccctagcatcctccagcacactggatcatgttcagtacattaaaagttatgatataaaaataataccattttaaattattgatttaggatatagaaattgatcttaaattgaggggttcttttgccataatgttccatatcaaaggtaatgtttaatgttgttactttgcaactccatagaaaatatgttatatattggtatttaattcccccaaattttaaggcaatttcatgcctagttattaaacacaaggaaagagagttagcaagaaatttgctttatgttattaaaaataatgtggtagaaggtaactagggaaaaaaacttgtgacccagtagagtcattctaaaacaaaaacttcaaaggaactcattctctgacctggcaggggatgaggagtgaaggagaaagaaacttactactatctgaatacctactctgtgccaggtattcttcacattctcatatttaattttcacaaccgtccagtaagagaagtattttgttcttcattttacacgtaagtaagtagaaggttagagagtgtgagtcatttgtacaaggtcactagcctggttgcagcaaaaatagaattcaaacccagtttgctagattccaagcctgctgtcagttctgctataacccagtgccccctgaataaggagaacaatgagaagaagggcaacaaatcctagagaaccataagaaaacttaatattttattatgtcttcttgtagtcaaaaaccactggtacacgataaaggcaactaagcaaaaccggtttccttagaactcctggtgttatgagggcaacactcaaaagagatatttgaatagaggaacactgagaggacaagagtgcaaaatcagcccaaaaatgtttgcatgctgatttgtcactattgtactcttcctccacatatattttctaggaagaacatggaactgatgagtaacttatgaaaattactgagtactttttttctaatagtctagtactagattttgtttattttaacagagccatttacattatatattaactcagtttaatatttttctttatgccccatttttacccctaattgtagactgtgttaggtcctctggctctagaaacagcaagagtctccacaccccacttggaaccatatgcgaaggatgagatgacagtagcatttttagccatctcgatcgcagctccaaatggagctctacttatgggcattctggggcctaaaatgcttacacaccattatgatccaagtaaaataaaactgcaattgtcaacattagaacatcattaaaaagtttacctgtcatcatctgcctgcttcttttaatgaattatttcacatgacagaagaattttaaagtagaaatatgtagggactgtacagaaaatccaggatttagtaaacatgtgatttcagtacagggcttttcttggacattttactccaaagttaatttaataaaaataataattaaatggaatgctctcttggtatttacatactgtaagaacaaattaaatctgtaaatccctaggaaagtttaaaataatccctcaggctgaatttgatatcataataca

SEQ ID NO: 164 - DNA, 5334 bp, homo sapiens
cccacgccgcgccttccggttggtccttgaggcgacgggtgaggcacagctgagcgccaaagccacaggctggggcgctaacgcccccgctcagcgctctgcgctccagacagctgcgagctggagtaggaaggttcaggcggtggcggagagtgcgctggaggctggagggccaggaggcgggaagcttcccgcacgggggcgctgtcacctgcctgtgggaggagccagagagggacctggctctgctgctctgaagcaccggagtcgggagaacccatccagacatgaagagcgccaaaggtattgagaacttggcttttgtcccctccagcccagacatcctgcgccgcttgtctgcgtcgccctcccaaatcgaagtctctgccttgtcctctgacccccaaagagagaattctcagccacaggagcttcagaagccccaggagccccagaagtcaccagagccatctctgccttcagcccctcccaatgtctccgaagagaagctccggtcactgtcgctgtccgagtttgaggaggggtcttacggctggaggaacttccatcctcaatgtctccagcgctgcaacacacctggaggctttctgcttcactactgcctcttggccgtcacgcaaggtattgtagttaatggcctagtaaatattagcatttccactgttgagaagcgttatgaaatgaagagttccctgactggcctgatttcatcaagctacgatatttcattctgtttgttgtctttatttgtatcattctttggtgaaagaggacataagccgagatggcttgcatttgcagcctttatgattggactgggagcacttgtattctcattgccacaatttttcagtggagaatataaattggggtctctttttgaagacacttgtgtaacaacaaggaatagcaccagttgtacatcttcaacttcttcactttctaactacttgtatgtcttcatcttgggacaactattgctgggggcaggaggaactcctctttatactctgggaacagcctttcttgatgattctgtgcccacacacaagtcttctctctatataggaaccggttatgctatgtcaatcttaggccctgctattggctatgtattgggaggacaactgctaaccatatacattgatgttgctatgggagaaagcactgatgtcactgaggatgatccgcgatggttgggagcttggtggattgggtttcttctatcatggatctttgcttggtctttaataatacctttttcttgctttccaaaacatttaccaggtacagcagaaattcaagctggaaaaacttcccaggctcatcagagtaatagtaatgcagatgtgaaatttggaaaaagtattaaagattttccagctgctctaaagaatttgatgaagaatgctgtctttatgtgtttagttctatcaacttcttcagaagccttaattactactggatttgctacatttttacctaaatttatagaaaatcaattcggattgacatccagcttcgcagctactcttggaggggctgttttaattcctggagctgctctcggtcaaattttaggtggcttccttgtttcaaaattcagaatgacatgtaaaaacacaatgaagtttgcactgttcacatctggagttgcacttacgctgagttttgtatttatgtatgccaaatgtgaaaatgagccatttgctggtgtatctgaatcatataatgggactggagaattgggaaacttgatagccccttgtaatgccaattgtaactgttcgcgatcatattattatcctgtctgtggagatggagtccaatatttttctccctgctttgcaggctgttcaaacccagttgcacacaggaagccaaaggtatattacaactgttcctgtattgaaaggaaaacagaaataacatccactgcagaaacttttggttttgaagctaaagctggaaaatgtgaaactcattgtgcgaaactgcccatattcctttgcattttctttattgtaattatttttacctttatggccggtactcctataactgtgtctatcctaaggtgtgttaatcacagacaacggtccctagccttgggaatacaatttatggtccttcgattattagggacaattcctggaccaattatatttggtttcacaatagacagcacatgtattctttgggatataaatgattgtggaattaaaggagcttgctggatttatgataacatcaagatggcccatatgctagtagccataagtgttacttgtaaagttatcaccatgttcttcaatggatttgcaatctttttgtataaaccacctccatcagccacagatgtgtcatttcataaagagaatgcagttgtgactaatgttttagcagaacaggatctcaacaaaatagtaaaagaagggtgaaatgggaaaagagaagactgttttacacctggaaaatttacctcgatttttaagaacacacattgccatggcaggattatctatccaatatggacaatcatatttacaaaattgatgtttttataatcaaatgtatttttttacttatgtagtttttgttttatgcaagaaacagacctgtgccttcaaagcccacgtaaagcctcaaaacacagcacacacacacacgagcacacacacacacacacacacgaacacacacacacacacacacacgcacacatacacacttatttcctattcccattgtctaggtatgaaatcctcaagcaataacaagaaaaaaggcccacaattagaaaaatttacatttaaaaaaaatgttgtttctatccccattacaacttgtttaattttaattttcattgtcaatattttgagcttagaacatttatggtataaaaatttaaactaatcaaagttgtgtgatgatttccgggaattattattgaaagcctatgaatttaaaaccaggtttaccatgtaatttgtttttaaatttatgtatactagcctggcctttctccaagcaaattattgaactattagaatatgttagttatcatccttgtgtcttagtatatagtgaatacagaaacatcagcattgtatacacatattttcactttaactcaagaattccaggaggtaatttgttgatattacaatttttaacacatttatgattctgtgataatattattcaattgcatatatttcagaggaaagtaccagtcagtaaagaaaaatgccaactaaacatgaaactattgatcaatacttatatacctttaatttttcctatttgaaaagccaaccacttaacacattactcatagcacctaagacagtgccttgcatagtgtagtcatctattattattgtttaattagaatattaaaccctaccctttaactcagcagtccccaaccttttttgcatcagggaccatttttgtggaagacaatttttccatgggggaagaaggtatggttttgagatgaaactgctccacctcagaccatcaggcattagttagattctcataaggagagtgcaacctagatcccttgcatgtgcagttcccaatggagtgtgcactcctatgagaatctaatgccactactgatctaacaagaggtggagctcaggcagtaatgctcactcacctgcctctcagctcaccaactgtgtggcccgattcctaacaggccacacacagcccagggctggggacccctgctttaactgatgcattgatttgataaagtattttacaagcctgataatgttataaccctgtttattcaggtcagatttatgccaactttgctgagaatatggagggtatagatgagtgaacatcaacaaacataacttctaccatggttaagaattttacttaggaaaagtattgaagttcaaatccagatagtattacatttgaaattgttataagggttattaatttaataaaattcatcatcaggtttcccctataagctttctcctaggttaattttccacaagcattgttttatatacactgtaatcaggataacacaagcttagtgttagatcttgtaggaaaccaagattagaaacattagaaatttgcagaatttaagaaattatgttttgtggtaatctatggccaacgatgttagaacctagcgcaattgtaaagtgaaattcaaggagaaggaatgaggagttagggaagcagcatacttgaatattagagaaggagaggagctgtgggtcaggaatcagagagacctgctaaaaccagacagatataaacaccaaagacggaagccaaataggtagccaaaaatccagatatttgagaagcaggaaatttatagcaaccaaagaaatagggcaagagaggcaggtgaacacacatgatacctcaattgacaatcttcctcccaccaagccagacacgttgtaaatgctgcttcctattggagcccagaaaaaaggaaaaggaaagtttaggctttctttgtcctttgtgtggaagcagggaattggattgaagactttcatagttgtaacataaaggcaaatcctgaggaactcactgatggagatgtgaaatggcagtaaggaagaaaacagaataactgaacaaatatattagtctagggccacttaatttagaggaagaaaaaaaatcaacccatccatagaaatagtttgataaacaggtcactaaatcattggcgtttataaagattcttagctatcaagggctgcattgtattttatatactcagttttataaggtgatactttttaaataagcgctttaatgaaaatggttagactgaaaataattttggtccttaaaaggagtcaggagcttttatatataaggtacatattttaaaagaatacctcctttataacagggttttacagacactaccataatttataatcattattttttacttttgggttcacctagatcatatgagttgatgtgatacttctagaacaaaattattcatagtgcgttttttgtaatttatgattgttaagtaagcttgacttataaattgacattgtaattgtgtacataattggatatatgtgttaaaatttaacatttagatttacttaattgtagaaaatacaaatgtaaaacttacacatggaaagaactgtatgcagttgactttactatgtaaattggagggaaacaaagttttagatccattttctttcaaaattttctttattgtaaagtatgcaaaatatatattcataccatttattaaatcagaatgtttatacaaaa

SEQ ID NO: 165 - DNA, 2043 bp, homo sapiens
tctgtcttttcctccttccagtgcccggcgttcctcccttccccctcgccgccgaccgagttcttccttttcagaccgggtcgccttgctgtcgtcgcggtgattttcctgctactgctactgctgctgctgccaccgccactaccactgggctcatttgccccgaccccttcccgccgccccgcccccagccccacacaagatgtcagaggatttagcaaagcagctggcaagctacaaagctcagctccagcaagttgaagctgcattatctggaaatggagaaaatgaagatttgctaaaattgaagaaagatttacaagaagttatagaactaaccaaagaccttctgtcaactcaaccttctgagacgcttgcaagttcagacagttttgcttctactcaacctactcattcatggaaagtaggagacaagtgtatggcagtctggagtgaagatggacagtgttatgaagcggagattgaggagatagatgaagaaaatggcaccgctgcaatcacctttgctggttatggcaatgctgaagtgactccactgttgaacctcaagcctgtagaagaaggaaggaaggcaaaggaggacagtggcaacaaacccatgtcaaaaaaagaaatgattgcccagcagcgtgaatataaaaagaagaaagctttgaaaaaagctcagagaataaaagaacttgagcaggaaagagaggaccagaaagtgaaatggcaacaattcaacaacagagcctattctaaaaacaaaaaaggccaggtaaagaggagtatttttgcttcacctgagagtgtgactggtaaagttggagtaggaacctgtggaattgctgataaacctatgacacaatatcaagatacctctaaatacaatgtcaggcatttgatgcctcaataatcagaaaaactgttggatttcatctctgcagggctttacatttacctttttatccttatatttttctaaaggtaaattatttgttagatgagtaagcaagataccattgtcgtcattggttggcttcagtagaatgaaacgtgaagaaattgcatttgataactgctattcatttaacttttctcattatcagtaccacggttccctcaaagtttgttgaataaagcaacttttgtagatgctgtttcatacagcacttagatgaattattgatcttcctaatatcaggcgcctacttaacctatggtgtgtactttttgtaagttgtaacttgaaattttcagatgctttgaacttgacacatactctagcaattcattggaacaccaaggcaaaaacaccaacctgctaaaagagatcttttcatttttcttattttcagctttaaaacttagctgtcgttcagttaagcttaaagataggttaatttgtaaatggcaaagtttgttttgaggtttttcctcaataacttgtttcccaggcctattaggccatctctaaaattgatctagctgttttatttttatgtactcttagttttatgtaagaaaccttaggatgagctcccttttctaaggtgtttttgttttttgtatgtttgcttttttcctgttttttgttttttccatttacggcagtggtaccatgttttggatgtgtgatgtttatatgggagaacaaaaagctgatgtatagccctgtatacagtgtagatactatttttgtaaaaacacaaggctaaattaatgaacaagaatactgaatatttcatcattaaaaatttcttgtatttcttgtgcattaatctgacgataatttccctgtatattatgttcatttagctgtttgtaatttttgttaattagatcaggttgtctgcatttgttggtgtaagtgaacatcatcacagttatcctgagttgagtttaagccaaatacatgcatagaaaagggtcttcctattaatggaagaaggtaatttttaggatgtgtattatttcagttttgtatgtttaacttttattaaataaagtgtttttaaaatctccaaaaaaaaaaaaaaa

SEQ ID NO: 166 - DNA, 130 bp, homo sapiens
tgcctcattctagagaatgggcactgttgatcatggtgtccaaaaatagttaatgtggctaaattgagacaggttatgcttccatcacagtatgcatattgcagtggtgacaatgagacctgtaacattt

SEQ ID NO: 167 - DNA, 132 bp, homo sapiens
ctgcgaatattctcgctgttctgattttgtaatagtcaggacaggctaaacattcgctatattaagaccatgcatgtgtccccaaacctagttctttccctaggtctggtttcataaatgctggtgataaac

SEQ ID NO: 168 - DNA, 137 bp, homo sapiens
gtcttctcattgagctcctttctgtctatcagtggcagtttatggattcgcacgagaagaagagagaattcacagaactagcattattttaccttctgtctttacagaggtatatttagctgtattgtgagacattc

SEQ ID NO: 169 - DNA, 77 bp, homo sapiens
gggaccaatgataatgactgttggggtatgagtcagtgaggttgaataacagtttgtatctggaaatctgaggtcca

SEQ ID NO: 170 - DNA, 81 bp, homo sapiens
gggtcgatgatgagaaccttatattgtctgaagagaggtgatgacttaaaaatcatgctcaataggattacgctgaggccc

SEQ ID NO: 171 - DNA, 94 bp, homo sapiens
tggatcgatgatgacttccatatatacattccttggaaagctgaacaaaatgagtgaaaactctataccgtcatcctcgtcgaactgaggtcca

SEQ ID NO: 172 - DNA, 70 bp, homo sapiens
cagtagtgatgaaattccacttcattggtccgtgtttctgaaccacatgattttctcggatgttctgatg

SEQ ID NO: 173 - DNA, 217 bp, homo sapiens
aagactatactttcagggatcatttctatagtgtgttactagagaagtttctctgaacgtgtagagcaccgaaaaccccgaggaagagaggtagcgttttctcctgagcgtgaagccggctttctggcgttgcttggctgcaactgccgtcagccattgatgatcgttcttctctccgtattggggagtgagagggagagaacgcggtctgagtggt

SEQ ID NO: 174 - DNA, 2980 bp, homo sapiens
ggggggagcgcgccgggcgcagggagctgagtggacggctcgagacggcggcgcgtgcagcagctccagaaagcagcgagttggcagagcagggctgcatttccagcaggagctgcgagcacagtgctggctcacaacaagatgctcaaggtgtcagccgtactgtgtgtgtgtgcagccgcttggtgcagtcagtctctcgcagctgccgcggcggtggctgcagccggggggcggtcggacggcggtaattttctggatgataaacaatggctcaccacaatctctcagtatgacaaggaagtcggacagtggaacaaattccgagacgatgattatttccgcacttggagtccaggaaaacccttcgatcaggctttagatccagctaaggatccatgcttaaagatgaaatgtagtcgccataaagtatgcattgctcaagattctcagactgcagtctgcattagtcaccggaggcttacacacaggatgaaagaagcaggagtagaccataggcagtggaggggtcccatattatccacctgcaagcagtgcccagtggtctatcccagccctgtttgtggttcagatggtcatacctactcttttcagtgcaaactagaatatcaggcatgtgtcttaggaaaacagatctcagtcaaatgtgaaggacattgcccatgtccttcagataagcccaccagtacaagcagaaatgttaagagagcatgcagtgacctggagttcagggaagtggcaaacagattgcgggactggttcaaggcccttcatgaaagtggaagtcaaaacaagaagacaaaaacattgctgaggcctgagagaagcagattcgataccagcatcttgccaatttgcaaggactcacttggctggatgtttaacagacttgatacaaactatgacctgctattggaccagtcagagctcagaagcatttaccttgataagaatgaacagtgtaccaaggcattcttcaattcttgtgacacatacaaggacagtttaatatctaataatgagtggtgctactgcttccagagacagcaagacccaccttgccagactgagctcagcaatattcagaagcggcaaggggtaaagaagctcctaggacagtatatccccctgtgtgatgaagatggttactacaagccaacacaatgtcatggcagtgttggacagtgctggtgtgttgacagatatggaaatgaagtcatgggatccagaataaatggtgttgcagattgtgctatagattttgagatctccggagattttgctagtggcgattttcatgaatggactgatgatgaggatgatgaagacgatattatgaatgatgaagatgaaattgaagatgatgatgaagatgaaggggatgatgatgatggtggtgatgaccatgatgtatacatttgattgatgacagttgaaatcaataaattctacatttctaatatttacaaaaatgatagcctatttaaaattatcttcttccccaataacaaaatgattctaaacctcacatatattttgtataattatttgaaaaattgcagctaaagttatagaactttatgtttaaataagaatcatttgctttgagtttttatattccttacacaaaaagaaaatacatatgcagtctagtcagacaaaataaagttttgaagtgctactataataagtttttcacgagaacaaactttgtaaatcttccataagcaaaatgacagctagtgcttgggatcgtacatgttaattttctgaaagataattctaagtgaaatttaaaataaataaatttttaatgacctgggtcttaaggatttaggaaaaatatgcatgctttaattgcatttccaaagtagcatcttgctagacctagttgagtcaggataacagagagataccacatggcaagaaaaacaaagtgacaattgtagagtcctcaattgtgtttacattaatagtggtgtttttacctatgaaattattctggatctaataggacattttacaaaatggcaagtatggaaaaccatggattctgaaagttaaaaatttagttgttctccccaatgtgtattttaatttggatggcagtctcatgcagattttttaaaagattctttaataacatgatttgtttgcctttctagatttctttatctttctgaccagcaacttagggagcagaatttaaattaggaagacaaagggaaagattcatttaaaccatatttttacaaagtttgtcatttgccccaaggtcaaattttaaattcttaattttcattttatttcccattttaggtaaaagtttgcatttaatcttagaattatgttatttttgttagtagtgtggaaacttagagaacttattgtatggtgccttgcaaaaatagagatagaaagattttagcatgcataccaatatagtatattacgcaatatataagcacacctaattaacagattaatatcagtaaaggtattgctgctggaatgaagaaaatgggatacgtttgtttctttttttctattgttacataattgccatgtggacttgtttatgattattgtgtagagtagcatttaagatttaactgtagcaaaaattactttaaccgctgtatttaagttagcatgttaattaattgtgtagacattttggcacaccatcacttttaactatatcataccaatggttttgtgcccataataaaaatggaaaaacctgttgaatgttacgtattggtatctttaatttcaacagtgggtaaactggtttcccagtatacaattcattgaaagcaaaattgattaattatttccatttaatttatacacactcaatacaaaatttaatgttgactttacgtaataaagtataatgcattttcttttttactgtttatgtatagtttacaaaataaagaatcttgtaaccaaa

SEQ ID NO: 175 - DNA, 4604 bp, homo sapiens
gctcttcttccttccttctccagtcccttccactgtgcgtcttctgtcccccgttcttccccagcggacccctctttcgagactccctagtggggtccccagctcccgggcgatcctgcccttgccgagcgcgttttctggagtcacctgggggaggggagtcctgggcagggccgggctggggaagacgcctggggcactgcccggcgttaacaaagggagccgataccgaccggcgtgggcgcggagcgggcggccgccaccgagcgtgctgagcaaccgcagcctccgcggccgagagtgcagcgagcaaggggagagccagttgcgcagagccctgcaaccagcagtccagggagaagtggtgaatgtcatggagcccagctgaaatggactggcccccttgagcctgtcccaagccctggtgccaggtgtccatccccgtgctgagatgagttttgatcatcctgagaaaaatgggccttggcctgcagacccaataaaccttccctcccatggataatagtgctaattcctgaggacctgaagggcctgccgcccctgggggattagccagaagcaggcttgttttcctgctcagaacaaagtgacttccctgaacacatcttcattatgattcacaccaacctgaagaaaaagttcagctgctgcgtcctggtctttcttctgtttgcagtcatctgtgtgtggaaggaaaagaagaaagggagttactatgattcctttaaattgcaaaccaaggaattccaggtgttaaagagtctggggaaattggccatggggtctgattcccagtctgtatcctcaagcagcacccaggacccccacaggggccgccagaccctcggcagtctcagaggcctagccaaggccaaaccagaggcctccttccaggtgtggaacaaggacagctcttccaaaaaccttatccctaggctgcaaaagatctggaagaattacctaagcatgaacaagtacaaagtgtcctacaaggggccaggaccaggcatcaagttcagtgcagaggccctgcgctgccacctccgggaccatgtgaatgtatccatggtagaggtcacagattttcccttcaatacctctgaatgggagggttatctgcccaaggagagcattaggaccaaggctgggccttggggcaggtgtgctgttgtgtcgtcagcgggatctctgaagtcctcccaactaggcagagaaatcgatgatcatgacgcagtcctgaggtttaatggggcacccacagccaacttccaacaagatgtgggcacaaaaactaccattcgcctgatgaactctcagttggttaccacagagaagcgcttcctcaaagacagtttgtacaatgaaggaatcctaattgtatgggacccatctgtataccactcagatatcccaaagtggtaccagaatccggattataatttctttaacaactacaagacttatcgtaagctgcaccccaatcagcccttttacatcctcaagccccagatgccttgggagctatgggacattcttcaagaaatctccccagaagagattcagccaaaccccccatcctctgggatgcttggtatcatcatcatgatgacgctgtgtgaccaggtggatatttatgagttcctcccatccaagcgcaagactgacgtgtgctactactaccagaagttcttcgatagtgcctgcacgatgggtgcctaccacccgctgctctatgagaagaatttggtgaagcatctcaaccagggcacagatgaggacatctacctgcttggaaaagccacactgcctggcttccggaccattcactgctaagcacaggctcctcactcttctccatcaggcattaaatgaatggtctcttggccaccccagcctgggaagaacattttcctgaacaattccagcctgctccttttactctaggggcctctgtcagcaagaccatggggacttcaagagcctgtggtcaggaaatcaggtccagccttccctgtagccagacagtttatgagcccagagcctcctgccacacacatgcacacatatctagcattctttccagacagcatcctccccgccttccaccttggtagatgcaaggtctatctctcccatcagggctgccaaagctgggctttgtttttcccagcagaatgatgccattctcacaaaccaatgctctatattgcttgaagtctgcatctaaatattgatttcacgttttaaagaaattctcttaaattacaattgtgcccaatgcagggtggctctggggggcaagtaggtggtacaggggattggaaacatgctccgcgcctccagagaaaagttgctcccgaggtccatgcccctggaacgtgttcctatcactctggctggttgggctggtccttagactgggtgcttatgattaaagggtcttggttagcccactttccctctccatgtggagatggaaggtagagaaggatacagtgtctatcctcaagttgctacggttcagtgagagaggcagacatctgaacaggcaggtaggattcagtgtgctcagtgcactggggatttggagagagatgggcttgctctctctgtgcacccaggagggccacgcacttaaaactgtgtttgtggatcagagaaggctttatagcacagggggcattcagatgagtcttagaggaagagaagaaacatggcaagcagattacatctgagccgtttgaattgtgtttttctttcttcccatgtttattttctaagatctacctgaacttagagactcaagatatttttttaggaaacctcctacccatgtctgaggtagcaagtgcagcctcacgacagataccaggcaatccagagccacaaaacgtgattcctccaggctctgcctggcctgaccctgtcctgtcagctgggtttacataccagtcccattcttccttttcaatacctacccccaaatcttctcctaaccaccatctgttttttttttttaaagcattttttgctttaaaagcatcctgaccccaatttctttgagctcacgggccttttgctgaaggtctctcagggtgtagtggtgtggctctctggacttaacgtcactctcagaggtcagaaccttggagatcagaactgattctcaccaggtgtgagaggtgtggtagcagattgcaatgctctgcacctcttccttgcaagtgagcaacttcaggctctctgggcagaggctggcccactgtagtttgcagacatgctctccagatggttttactaagtcccctctccctgatagggaatcctgctggaccagcgcagccctggtgtggagaggttaaaagacttgcacaggatcaccaagtcatgctgtagagccaggattcctagacccagggctctgcactctcaaggctggccccatgtgctcaaggggatctaatgtttgggctccaaactaaccatctcggagctgggctcctcatttactgccaaaccctcagcttatgtagctagaaagggccctggagtgagaaagcctggattttcaaattgatgctcccctactgactagctgtgccactctgggcaaatgctcttccttgagcctgtttccacacctgtaaagtggggatgatgatcctatctcactgcttttgtgaggattacaggaaagcacctgtcctggctctgtacctggcacgtagtaggtgctcagttcatgctggtttccttcctgcctttagtagggacctgctctgtgctcacacctcggctgcatgcaccctgctgtgacggaggctagtgtggaagaggtcctgtcctcagggaattaactgtcttattgggagacaacaactgtcctccttggaacacccaagaaaccatgcaaagcagtggacaacacagaacacgccctcctcctcgctgcctgcagctccaatctgattctgcttgggaatgggcggagcacgtgggctgcttaactgctgtataggacaagccccttacccctctctgggcccatgaattcctggcttggtttatgttctgatttgacacactgattttaatcttcgaatcatgacactgagtgcagaggaggtggcattccgacagcaggacatacatgttggtgtgaagactgggacgacactgggtagaatctagtttttaattattattaatataaaggatcaaattaatttaaatatgattctgaagtctacagaacttttagttctgtgctgtctatgtggacactttggtaaaatgcaaattatgatatggacgttatcattggtctggtgagatgtttcatatttgtgacagttaatttaaaaattatgagttaatgctgcctgtgtctatggggttctgtcttctttgatagccatctattcatctggatcatgggaccctctctaatccttccaccaatcaaataagctattgctattggtttggagttgagatatcagtctcggaaacttctgaaaaatgctaataattacccaaggattatgtcaaattttaaaataaatgtgtgtgtgtttctttaa

SEQ ID NO: 176 - DNA, 2094 bp, homo sapiens
gcggaggcagaggcggaggcggcacccaggggccggggcaggggaggccgggaccatcgcagtgacaatttattttcctgcagcagcggcagcagggacggttgctgcaggttcggggtcggccggcctgcgcgtgggcttgcgaggacgctgttcgtcccctgcgctggggtgtccgacagcgaggaggagaacgacgcacggagcccgcgcgactggaaccagcaaagctccatctgtcggcagaggagaagggggaggaggcacggccgaggcaaacgagcggacgcctcgtcgccgggtgccggtatcaccccgctgcaacgccttccagcaaaagccaccgcggcccgggttgcagcagccggacggatgccaaggccacacggcagccacgggggcagccgtcgcagtcgccgtcccacacgggctgcggacaccaagggttgctaatgaagtgattgagaagaaacagtgaacatcctcatttcacagataagacaacatggatcagccttttactgtgaattctctgaaaaagttagctgctatgcctgaccatacagatgtttccctaagcccagaagagcgagtccgtgccctaagcaagcttggttgtaatatcaccatcagtgaagacatcactccacgacgttactttaggtctggagtagagatggagaggatggcgtctgtgtatttggaagaaggaaatttggaaaatgcctttgttctttataataaatttataaccttatttgtagaaaagcttcctaaccatcgagattaccagcaatgtgcagtacctgaaaagcaggatattatgaagaaactgaaggagattgcattcccaaggacagatgaattgaaaaacgaccttttaaagaaatataacgtagaataccaagaatatttgcaaagcaaaaacaaatataaagctgaaattctcaaaaaattggagcatcagagattgatagaggcagaaaggaagcggattgctcagatgcgccagcagcagctagaatcggagcagtttctgtttttcgaagatcaactcaagaagcaagagttagcccgaggtcaaatgcgaagtcagcaaacctcagggctgtcagagcagattgatgggagcgctttgtcctgcttttccacacaccagaacaattccttgctgaatgtatttgcagatcaacctaataaaagtgatgcaaccaattatgctagccactctcctcctgtaaacagggccttaacgccagctgctactctaagtgctgttcagaatttagtggttgaaggactgcgatgtgtagttttgccagaagatctttgccacaaatttctgcaactggcagaatctaatacagtgagaggaatagaaacctgtggaatactctgtggaaaactgacacataatgaatttactattacccatgtaattgtgccaaagcagtctgcgggaccagactattgtgacatggagaatgtagaggaattattcaatgttcaggatcaacatgatctcctcactctaggatggatccatacacatcccactcaaactgcatttttatccagcgttgatcttcacactcactgttcctatcaactcatgttgccagaggccattgccattgtttgctcaccaaagcataaagacactggcatcttcaggctcaccaatgctggcatgcttgaggtttctgcttgtaaaaaaaagggctttcatccacacaccaaggagcccaggctgttcagtatatgcaaacatgtgttggtaaaagacataaaaataattgtgttggatctgaggtgatatgttctgaatgtaagcaccgtcaacatcagacacctactcatggacatgtggttgccggattttcttaagatgtttccagaaatgactgatattttatatttatacattttagatgacaaagcttgatatttattgctgttgcacattttaaagttttctttttgggttgctctgtgtcaagagaggttacatggtgttaaatcggtacctgataatgtacccaaatactatggccagataataaattgtgctgcaaacaacatgtcttgtattta

SEQ ID NO: 177 - DNA, 1323 bp, homo sapiens
gatttcggcctgactattacttgggccacggaaatagccaacccttttcttccgcacggttggaggaggtcggctggttatcgggagttggagggctgaggtcgggagggtggtgtgtacagagctctaggacaccaggccagtcgcgggttttgggccgaggcctgggttacaagcagcaagtgcgcggttggggccactgcgaggccgttttagaaaactgtttaaaacaaagagcaattgatggataaatcaggaatagattctcttgaccatgtgacatctgatgctgtggaacttgcaaatcgaagtgataactcttctgatagcagcttatttaaaactcagtgtatcccttactcacctaaaggggagaaaagaaaccccattcgaaaatttgttcgtacacctgaaagtgttcacgcaagtgattcatcaagtgactcatcttttgaaccaataccattgactataaaagctatttttgaaagattcaagaacaggaaaaagagatataaaaaaaagaaaaagaggaggtaccagccaacaggaagaccacggggaagaccagaaggaaggagaaatcctatatactcactaatagataagaagaaacaatttagaagcagaggatctggcttcccatttttagaatcagagaatgaaaaaaacgcaccttggagaaaaattttaacgtttgagcaagctgttgcaagaggattttttaactatattgaaaaactgaagtatgaacaccacctgaaagaatcattgaagcaaatgaatgttggtgaagatttagaaaatgaagattttgacagtcgtagatacaaatttttggatgatgatggatccatttctcctattgaggagtcaacagcagaggatgaggatgcaacacatcttgaagataacgaatgtgatatcaaattggcaggggatagtttcatagtaagttctgaattccctgtaagactgagtgtatacttagaagaagaggatattactgaagaagctgctttgtctaaaaagagagctacaaaagccaaaaatactggacagagaggcctgaaaatgtgacaggatcatgaatgtcaaaggtgaagcatatagaaaaaacgacttcatagaaatgaataaagataaatgtggatatatgtaccagtctggtggtgaagaaattctgaaacccagaactttataacaagaaaaaaaatttttaaccctgtgaagaagtttgtgaaagaaacttgtgaagtagtaataattagaaaaaaaaccattaaaacaccagagaaaatacatagaaaaaaaaaaaaaaaa

SEQ ID NO: 178 - DNA, 954 bp, homo sapiens
atgggtggtgtcataaagagcatatttacattcgttttaattgtggaatttataattggaaatttaggaaatagtttcatagcactggtgaactgtattgactgggtcaagggaagaaagatctcttcggttgatcggatcctcactgctttggcaatctctcgaattagcctggtttggttaatattcggaagctggtgtgtgtctgtgtttttcccagctttatttgccactgaaaaaatgttcagaatgcttactaatatctggacagtgatcaatcattttagtgtctggttagctacaggcctcggtactttttattttctcaagatagccaatttttctaactctatttttctctacctaaagtggagggttaaaaaggtggttttggtgctgcttcttgtgacttcggtcttcttgtttttaaatattgcactgataaacatccatataaatgccagtatcaatggatacagaagaaacaagacttgcagttctgattcaagtaactttacacgattttccagtcttattgtattaaccagcactgtgttcattttcataccctttactttgtccctggcaatgtttcttctcctcatcttctccatgtggaaacatcgcaagaagatgcagcacactgtcaaaatatccggagacgccagcaccaaagcccacagaggagttaaaagtgtgatcactttcttcctactctatgccattttctctctgtcttttttcatatcagtttggacctctgaaaggttggaggaaaatctaattattctttcccaggtgatgggaatggcttatccttcatgtcactcatgtgttctgattcttggaaacaagaagctgagacaggcctctctgtcagtgctactgtggctgaggtacatgttcaaagatggggagccctcaggtcacaaagaatttagagaatcatcttga

SEQ ID NO: 179 - DNA, 3080 bp, homo sapiens
acgtcagagggtcgcgccgctgcaggaacccgctctgcctgagctaccgcgagtcgtagaaaattacgtaatgatagggggccggtcagagtgagggcacctgaggtacacgaaatccctccggcttgcccacttcctcggactttccaccaatcaggagcttcctccccagcaccaaccaattgtgggagagaagttttctctgtgctacaagcccggaatttcattcatacccagctacgctccgaatgagggagcagaggtacagcggccgaatgagcgggaacagttattccacgacaggtgtacatcagacgcattgcttaggcctcttattttacgttctccaagcaactccataagacaactgtctcggaaaggctacagtgatgacagaccgacttaagttcggattcggcttccaccgcttcttagtggtatgcaaagaagccttttcaccctgatgtccttagagataatatggatcagtccagagttctcctctgggtgaaagcagaaccctttatagtgggtgccttgcaggtcccccctccatccaagtttagtcttcactatctcaggaagatatccacctatgtgcaaatccgggccacagaaggagcttacccgcgcctctactggtctacatggaggcacatcgcttgtgggaagctgcagttggccaaggacctggcgtggctttacttcgaaatatttgatagtctttcaatgaagacacctgaggagcgcctggaatggtctgaggttctgtccaactgcatgtctgaggaggaagttgaaaagcagagaaatcagctttcagtggacacgctacagtttctgctcttcttatacattcaacagttgaacaaggtctccctaaggacatctttgattggcgaagagtggcccagtcccagaaacaaatctcagtctcctgacctgactgaaaaatctaattgtcataataagaactggaatgattacagtcaccaagcttttgtctatgatcatctgtctgatctcctcgagctgcttttagatccaaaacaactcactgcatcatttcattcaacccatagtagtctagtgtctcgagaagctgttgtggcgctcagcttccttattgaaggtacaataagtagagccaggaagatctatccacttcatgaacttgcactgtggcaaccactgcatgcagatagtggcttctcaaagatctctaagactttctctttctacaaactggaaacctggttgaggtcctgtttgactgggaatccatttggtacatcagcttgcctcaagtctggaaagaaattggcttgggctcatcaagttgaagggaccaccaaaagagctaagattgcttgtaatactcatgtggcccctaggatgcaccgactggtagtgatgagccaggtttacaagcagacactggctaagagctcagacactctggcgggggcacatgtaaagattcatcgttgcaacgaatcttttatatatctgctctctcccttacgatctgtgacaattgagaagtgcaggaatagcatctttgtcttgggccctgtagggactacacttcacctccacagttgtgacaatgttaaagtcattgctgtttgccatcgtttgtccatctcttctacaacaggttgcatctttcacgttcttacgcctacacgcccacttattctctctgggaaccagacagtaacttttgccccttttcatacacattacccaatgctagaggaccatatggccaggactggccttgctacagtgcctaactattgggataatccaatggttgtgtgcagagagaacagcgacacaagagtcttccagcttttaccaccttgtgaattctatgtatttattattccctttgaaatggaaggggacacaacagagatacccgggggtcttccatctgtatatcagaaagcactgggtcaaagagaacagaagatacagatctggcagaaaactgtgaaggaggctcatttgacaaaggatcaaaggaagcagttccaggtactggtagagaacaagttttatgaatggttgattaatacaggacatcgccaacagctggacagccttgtaccccctgcagcaggctccaaacaagcagctggataaggatcttacatgcagacactgggccctggaaatacaaggataaatggaggatggtgctcatcttgaaacttgaaactaaattgggaaggtgctattgctgcttaagagacattgggacttttctgtctttttttttttttttttttgaggcagagtcttgttctgtcgcccaggctggagtgcagtggcgcgatctcggctcactgcaagctctgcctcccgggttcacgccattctcctgcctcagcctcctgagtagctgggactacaggcgcccgccaccacgcccggccaattttttttgtatttttagtagagacggggtttcaccgtgttagtcaggatggtctcgatttcctgacctcgtgatccgcccatctcggcctcccaaagtgctgggattacaggcgtgagccaccgtgcccagccttctgttctatttaagaactttgatttccattccattttcatttattactgtttaggccgaattttcgctaaacttctgactttcatataaacatattgcttatagaacatcagaagactcgtctttgtgatgcccaaatgaaaaagttggtgaaggtagtaccattgtatgtatgttaatattaaagcaactgagtgtagatttgcaactatagtgtgtatcttcatttgtgtgatgaaagagttttattctttctagagttaaataagagttttatagttctttgtaactatttaaaaggaaattgctactccttttaaaaaataattggaaaggaagtatgatttgttggtatatagacatagaaatagttttatactatattttagtccttaaagtatggaacttaatgaaattgtttaaaaaaatctttatttttcacttcctgcttcaaattttcaataaacaaactctaaagaaaaaaaaaaaaaaaaaa

SEQ ID NO: 180 - DNA, 3062 bp, homo sapiens
gggtcagggctagagccgtgagtgtcagcctgggatgggctacataaggcccagctctggcaccagagcttcattctttgttgcacagcaaactgcagaggtcactccaggctgtggctccacatcccgaggaacaaaagcgggcctgctcagctgtctgcaaggacggccgttccagaccaagtggcctgctgctccgaggacccagctcgctccaggctgtgactccacatcccgaggtcgctgcctggcgaccgggcagcgaggaccggccaccccagacttcctgtcccgcagccccaaagacagagctgcgaccgccgggacagcgacgcctgcacagctctggtgagatggcggcagggtccactacgctgcacgcagtggagaagctgcaggtgcgtctggccactaagacggagccgaaaaagctagagaaatatttgcagaaactctccgccttgcccatgacggcagacatcctggcggagactggaatcagaaagacggtgaagcgcctgcggaagcaccagcacgtgggcgactttgccagagacttagcggcccggtggaagaagctggtgctcgtggaccgaaacacccggcctggcccacaggaccctgaggagagcgcttcccgacagcgcttcggggaggctcttcaggaccaggaaaaggcctggggcttcccagaaaacgcgacggcccccaggagcccatctcacagccctgagcacagacggacagcacgcagaacacctccggggcaacagagacctcacccgaggtctcacagtcgcgagcccagagctgagagaaagtgccccagaatagccccagctgattccggccgctatcgggcctctccaacgcgcacagctcccctccggatgcccgagggccctgagcccgctgcgcccgggaagcaacccggaagaggccacactcacgcggctcagggcgggcctctgctgtgtccaggctgccagggccaaccccaggggaaagccgttgtgagccacagcaaggggcacaaatcgtctcgccaggaaaaacgccccttgtgtgcccagggagattggcactcccctactttgatcagggagaaatcatgcggggcctgcttaagagaggaaaccccaaggatgccctcctgggcaagtgccagggacaggcagccttcggacttcaagacagacaaggaaggggggcaagctggcagcggccagcgtgtccctgccttggaggaggctccagacagtcaccagaagaggcctcagcacagtcactcgaacaagaagaggcccagtctagacggccgggacccaggaaatgggacacacggcctgtcgcccgaggagaaagagcagctttccaacgaccgagagactcaagaggggaagccaccgactgctcatttggacagaacgtccgtgagctccctctctgaggtggaggaggtagatatggctgaggaattcgagcagcccactctgtcatgtgaaaaatacctcacctacgatcagttgcggaagcaaaagaaaaagactggaaaatctgccaccactgcacttggagataaacaaaggaaagcaaacgaatccaagggcactcgtgagtcctgggattcggctaagaaattgcctcctgtccaggaaagccagtcagagaggctgcaggcggccggcgctgattccgccgggccgaaaacggtgcccagccatgtcttctcagagctctgggacctctcagaggcctggatgcaggccaactacgatccgctttcggattctgactccatgacctcccaggcaaagccagaagcactctcttcaccaaagttccgggaggaagctgctttccctggacgcagagtgaatgctaagatgccggtgtactcgggctccaggcctgcctgccagctccaggtgccgacgctgcgccagcagtgtgcccaggtgcttagaaacaatccggacgccctcagcgacgtgggagaggtcccctactgggttcttgaacctgttctggaagggtggaggcccgatcagctgtatcgcagaaagaaagacaatcacgcactcgttagagagacagacgaattacggaggaatcattgtttccaggacttcaaggaagaaaagccacaggaaaacaaaacttggagggagcagtacctgcggcttccggacgccccagagcagcggctgagagtaatgacaacgaatatccgatctgcacgtggaaacaaccccaacggcagagaggcaaagatgatctgtttcaaatctgtggccaagacgccttatgatacttcaaggaggcaagagaagtctgcaggagacgctgaccccgaaaatggggagatcaagccagcctccaagcccgcgggaagcagccacactccctccagccagagcagcagcggcggtggcagagacagcagcagcagcatccttcgctggctccctgagaagcgggccaacccctgcctgagcagcagcaatgagcacgcggcgcccgcggccaaaacccggaaacaggctgccaagaaagtggccccgctgatggccaaggcaattcgagactacaagagaagattctcccgacgataaactcaggacttgccttgcagataaaatctggggggatttttgcattggcaaagtcaatgcgggttggggaacgaaacttccaatggacaccagaacctttaacttggtgcaaagttgagcctttgaattctgcaggtgtcatgtgctggccctgtgattttgcctcccacacccagccactacctcccagcttggagaacacctcagaattcagaagatatgaacgcattgggaacaattctattttggatgttcactgataatttttaaaaacaccctagttgtaatcataaataaggaaaaagatgtgagatttcctttttcctttcttttttttttcgaaatcaagtagataagaacttcttagacaaaaacacacaagccattagttgacactgataactccgaatacataaaatgtttgctgttgcaaaaaaaaaaaaaaaa

SEQ ID NO: 181 - DNA, 2269 bp, homo sapiens
cagttgcttctacaaaacccgtgaaagttctctgtccaaaagccttgttggtcccgcggtacatgcttcctgttcccagagagattcacccttgggctttcctatcagtcttccctaaagttggctgctcctgtgtcctgtcacataaaactgtgaaccgaggtctccgacttacgtcatgtcagtcacagcagggtgaggctccacaagtgtgagttctggcccctgctgctttcctttcaaatgcagtttacagtttattatggtattggacaccccatgctccttactgcattggctttgggtaagaaggagtgaaaattagtgtgcgaacctgaaaacctagaatttctgattgggactgaagaaaacctttgtgctgcagtcagtccccgagccagacgcctgtgactctcttcacatggaaatagatgactatccacagtaaaagcaaaattaaaaagtgacttgtgaaaaatatcctccatgctcctcttaccaagcctgcaacttaaaacctatggtttaaactgtgctttcaattatctggaggaggccagcactgatgagcccatcctgagccagtcattttaaggccagtgctacctaactgagacaaggctaatctggtcgccttgctgttagaggctctttcccagaagttggacgaagaggctcaggcgttgctgtttcttgtcttccaagtcaagtggttactctggtaatggattgcctctctccgagctttcaccctggtgagactgtccagatctagtctgtaaacccagcttagaagcactgttgtaaaaatgactgaagagcccatcaaggagatcctgggagccccaaaggctcacatggcagcgacgatggagaagagccccaagagtgaagttgtgatcaccacagtccctctggtcagtgagattcagttgatggctgctacagggggtaccgagctctcctgctaccgctgcatcatcccctttgctgtggttgtcttcatcgccggcatcgtggtcaccgcggtggcttacagcttcaattcccatgggtctattatctccatctttggcctggttgttctgtcatctggactttttttactagcctccagtgccttgtgctggaaagtgagacaaaggagcaagaaagccaagagacgggagagtcaaacagctctcgtggcaaatcagagaagcttgtttgcttgagactgaatacgaccaaatgggccattgggcctggaaaacgtgctctgactttgtcacccaattcacccagaaccatggtgggagagaacagacttggcgttggagcagactggaagaatgggggtgggagggtggaggggcttctcctttgtgaggaatgactcatgtcttctttaacgacaaacttaaccctaagggctacttctgagactgaaaaatcagctttctatttacatgaaacactttgggggtcatgggagtgcacagcattagacagtatttggttcaccctgtaaagtagccaagaaaagatgagaaaaatcaagataggcctggcacactagacatttgcctccaaaagaaataacctacagtcttaagatgtatcataaaaatgttctgccaaggatctaaattaccttgggtttcgcatatgtctatgaaattctgtgataatttttttcaatacattgattcactggcgtctgttttcattttatacttttaataactcatcactggtggtactttatcttgaaaagtaatattttttatattttaacattggacagtgttagccagttgtaatgatgtatcagaagtaaagaaaaacccattaaagttatagctaatagatgctgttgggggttaaattaatagtaaaataatccaatatagcacttttgatgatttttatataaaagtcaactgtacatttcattcagaataataaatacttattgctgctaaaacttcttaaatggttgtttctgctatagttatttctattgcagttccaaattgccatcttcccttgtctcatttgcaagttctcaattgtatttctctcaaatggacaggttccttctttactggaggatttttgtttttatcatattggtttttcattacttctgaatagtcttaattacgtttactaaattctaaaggatttctgtgctattataattaggaaatcaacgtctttggtcaggaactttataatgtgctattaaatgtatattacatttttgtggaaaaaaaaaaaaaaaaaa

SEQ ID NO: 182 - DNA, 1213 bp, homo sapiens
ttagggttttcaggcagaggaacagttggccaaggaagtcagcttctcagagctcaagagtagatctgagtttaactcattaaagatggcatggaagagcagtgtcataatgcaaatgggaagatttcttctcttagtaattttatttctgccacgtgagatgacaagttctgttttaactgtgaatggtaaaactgagaactatatcctggatactacacctggctcccaagcatctctgatatgtgctgttcaaaaccacaccagagaggaagaactgctctggtaccgagaggaggggagagtggatttgaaatctggaaacaaaatcaattccagctctgtctgtgtctcttccatcagtgaaaatgacaacggaatcagctttacctgcaggctggggagggatcagtccgtgtccgtttcggtggtgctgaatgttacttttcctcctctcctaagtggaaacgacttccaaacagttgaggaaggcagtaatgtgaagttggtttgcaatgtgaaagccaacccccaggctcaaatgatgtggtacaaaaacagtagtctcctcgatttagagaaaagccgtcaccaaatccaacagacaagtgagtcttttcagctgtcaatcaccaaagtcgagaagcctgacaacggaacctacagttgtattgcaaagtcatctctgaaaacggagagcttggactttcacctgattgttaaagataaaactgtgggtgtaccaatagagcccattattgctgcatgtgttgtgatctttctgacattgtgctttggactgattgctagaagaaagaaaataatgaagctctgcatgaaggataaagaccctcacagtgaaacagctctatgagaaagctgagatgccatcgaatacagagagagttttgcatcaggacctccacaatttatgtagtcccatctgtatttattgctattattaaattcactcctgtcactcctgtttcattaatcacttaacagtagttgttaggactaatttgatacacttgtggaacatttttatggaaagagctattaagaatgaaaagtaagattttgttaagtcttctccttgaagtatatgttaattaattgagatttgttccaaataggttggtaatcatttactgtttagtgtgttttttttctaggtaggagatacttgggtctcacaaattggtgcaaagcc

SEQ ID NO: 183 - DNA, 4575 bp, homo sapiens
cagggaggggaagacggggagccggacgcacgaccggcgagcacagaagggcacaggagctgctccgcgagataccagcgagctgaggcgcggggctggctgggaagtagtcccggccgggccctggccccgcccctgcagggcggagggacgcatcacgcaggggtggggaagccggatccgtgcgcagggttgctaagggtgaaacttttcattgactttgctcacttcgggccggggcgcgggaaggtgcgggttgttggctgaggcaagccgtggctcgggcgacgcggggccaggagggcaggaccgtctgccggcgacagcccataccgtctgccgttgcgcgacacgaaccaccctccgatccgccatccccgcgtcgtcgccgctagtccgcccgcccgccctcgggccccccgctgccgagcccgacctcctaagagctgaaagaaattattgagagtcatagtccatagccccctgcttcgtcccccaaccctcaacgacgaaaaggacttcggtcccctggcccggcgacgcccgggaaggaaaggagagcgacctccgccccgcgctcaggccaccctggagggagaagccgccccgcggccggtagagcgccccgccgccgcggagacccgaagccgcctggagcccaaggctgtacacgtgccctgtgctgattctctgcctaggaaaggaccatgcagctagagatcaaagtggccctgaacttcatcatctcctacttgtacaacaagctgccccggcgccgggcagacctgtttggggaggagctagagcggcttttgaaaaagaaatatgaaggccactggtaccctgagaagccactgaaaggctctggcttccgctgtgttcacattggggagatggtggaccccgtggtggagctggccgccaagcggagtggcctggcggtggaagatgtgcgggccaatgtgcctgaggagctgagtgtctggattgatccctttgaggtgtcctaccagattggtgagaagggagctgtgaaagtgctgtacctggatgacagtgagggttgcggtgccccagagctggacaaggagatcaagagcagcttcaaccctgacgcccaggtgttcgtgcccattggcagccaggacagctccctgtccaactccccatcgccatcctttggccagtcacccagccctaccttcattccccgctccgctcagcccatcaccttcaccaccgcctccttcgctgccaccaaatttggctccactaagatgaagaaggggggcggggcagcaagtggtgggggtgtagccagcagtggggcgggtggccagcagccaccacagcagcctcgcatggcccgctcacccaccaacagcctgctgaagcacaagagcctctctctgtctatgcattcactgaacttcatcacggccaacccggcccctcagtcccagctctcacccaatgccaaggagttcgtgtacaacggtggtggctcacccagcctcttctttgatgcggccgatggccagggcagcggcaccccaggcccgtttggaggcagtggggctggcacctgcaacagcagcagctttgacatggcccaggtatttggaggtggtgccaacagcctcttcctggagaagacaccctttgtggaaggcctcagctacaacctgaacaccatgcagtatcccagccagcagttccagcccgtggtgctggccaactgaccatctacctgcccgtggggccaggagcacccaagaccacagaaaagagaaaggaaaggccaaaaaaaagaggaaaagaaaaatgtacaaaaagattttcgatcttctcactcttacttctagaaaaaagatccagcccaggcacggaatgggagggccctgcaaagcacccaagtgtgtttcactcaccccttaccgctcgcccaccggcctgtgatttatttggttggtttgggttttatatttctttttcttttttttttttcttacatgtagttttctatataacatctttaatgagtggcttcctgtgctaagaatggtccagatgtgaactgctgctccctgctcctcccttcctccttcacactcctagtttaggattgatgtgtccaagctcatagggaagaaagagctgcagctggagcctgaccctccctggaacagggagaggctggcccgtgtcactgcctctgtcacccagctatcctcgcactcaaagccatccaacctcagcaggccttctcgggccctgccacctgaataggtctgaccccagtccccactccctttcaggctgggccacagggagttgctggctggccacttgacaccctccccctggagctgatgtctgtgactacagggagattagcacttcgtctagtgaaactcctttcatctctgtcctatggccccaccccaccattccctctaggcccagaccatcatcatggccctggccattgatgtgtatgggctttctttccctcatgcagccccttcttccccaggctggatgttgtgggtagggaggggtgtgtgtgtgtgtatttggtttgctgtccttttttaaaggattccaagccatgtgaaacttcccttctggatgtgattctgggtcgcaagtccttatttatatgtgaggctggggaatgggctgggggtattggcagtccttttgcagggcagtgtgtgtggtggggtgacaccgctgtggcttagcccaagacactcccagaggaaaacactgcagaaggaactggtttgcagactgtggaaggatctgcagttttgtttttgaccaaaaaaataataataagttagctctgaagggcagagggaatacccaagcccctgatgcctatgagaagtccctggacttcaaccctcctgttgtttggccttagcccagagggagctgctcacctgagcacccttgggggtgggcagagaggcagggtgggattttagagttagtgtctgtgcgggggcagccctgagcctggagttgagactttggggtctcttagtttggaggtgttgagtgcatttgtgcccctgcctggttgagagcttcttggtacctcttgccaccccttctcactgccctgacccaaccccactggaccttgatgctgcgaggagtggtgtcctgacggactcagcactcccgcctgatgtattggatcataggagagcacttgctctcctgcctctgccaggagagggcttgttcctccaactctaggaggccaggcaagcatggacaggagccaagggagcagggtcattaactttttcttctttgcaaagtgggcacttggcatcagggtcccaatcaccagaaagcaccaaagcccctggcaccccacccactccatcctacccagggaccccaagtaggcaactgttatggcagtgggtccagcccaggccagcactgccagcctcctctccctgcagtaggcaccagctctacctcccccggcaggcaatgtcctggcttctcagcccagcaccatctgttcccctagacttctcaggggccagcccagtctgggccaccctttgtttccctcatcctcggctcccacacaggtgacagacccagcagatagcttctctctgggaaaggttggatgctgccttacatccccttctagccctcctcccatccacacacacaggcacccacccacaccaggtcggcttgtttctcacatgtagggagagaggggagaccaacccctttgtgtcttttgaaatacgaagaaaaatgtgtgttcaggagcatgactccagtgctgcgctcttgggcccagttcagtctgtcttgtctcaaatctaggcatttttgcttcaattttattttttttaagaatacaaaaacagaaatctgcactaatttacctggtttcgtaggaaaacttttttttattttttacattttttggtgtccgtttgtattgaataatttgctacatttgtaaaatgtaagaggtatataatatatgtatatttctaacgtaaaaaacataatttttttcttttcaagattttttcttaaaaagatgagagaaacatattttttcaggaaaaacaaactttaaaaaaaaaagaggagaaataaaaccttttctcccctttccccatcctctatctatccctctttcccaggaacaaatcaaaaggtggattatcttctgaagaatggaaactgttagtccagaatgatgtgtttttctcaatgcagtgagttatagattctctagttttctccctagggatgggaagggggcattgaggcaagcctggagaggagcccggggagcagggtcatgaacttttttctttagtgaaggaggaatacaatcaagggttttgtattcagaatgttgtgcaatattttggaatgggacattggtgtgtttagagattttagtttaaaaacaaaacaaaaagattgatcaaatctgtacagtttctattgttccagatttttttaagtttgtattaaaagcatgatacataatagccttcaaaaaaaaaa

SEQ ID NO: 184 - DNA, 1504 bp, homo sapiens
atgagggagatcgtgctcacgcagatcgggcagtgcgggaatcagatcggcgccaagttctgggaggtgatctctgatgaacatgccatcgactccgctggcacctaccacggggacagccacctgcagctggagcgcatcaacgtgtactacaacgaggccagcggtggcaggtacgtgccccgcgctgtgctcgtggatctggagccgggcaccatggactctgtgcgctcggggcccttcgggcaggtcttcaggccagacaacttcatcttcggtcagtgtggggccggaaacaactgggccaagggacactacaccgaaggcgcggagctgatggagtcagtgatggacgttgtcagaaaggaggctgagagctgtgactgcctgcagggtttccagctgacccactccctgggtggggggactgggtctgggatgggtacccttctgctcagtaagatccgggaggagtacccagacaggatcataaacacattcagcatcctgccctcgcccaaggtgtcggacaccgtggtggagccctacaacgccaccctctcagtccaccagctcatagaaaacgcagatgagaccttttgcatagataacgaagctctgtatgacatatgttccaagaccctaaaactgcccacacccacctatggtgacctgaaccacctggtgtctgctaccatgagtggggtcaccacgtgcctgcgcttcccgggccagctgaatgctgacctgcggaagctggccgtgaacatggtcccgtttccccggctgcatttcttcatgcccggctttgccccactgaccagccggggcagccagcagtaccgggccttgactgtggctgagcttacccagcagatgtttgatgctaagaacatgatggctgcctgtgacccccgtcacggccgctacctaacggcggctgccattttcaggggtcgcatgcccatgagggaggtggatgaacaaatgttcaacattcaagataagaacagcagttactttgctgactggctccccaacaacgtaaaaacagccgtctgtgacatcccaccccgggggctaaaaatgtcagccaccttcattgggaataatacggccatccaggaactcttcaagcgtgtctcagagcagtttacagcaatgttcaggcgcaaggccttcctccactggtacacgggcgagggcatggatgagatggaattcaccgaggccgagagcaacatgaacgacctggtgtctgaatatcagcaatatcaggatgccacggccgaggaggaggaggatgaggagtatgccgaggaggaggtggcctagaactctccttttctaggtaaaggggggaagcagtgtggattctttactgtgttctgacagccatgtgtcactatacgcttgttaatttgtgtcttcacatctcctgctgcgttttaaagcatttttatagtatgcggttttgactaataaagtattctcacagcatctg

SEQ ID NO: 185 - DNA, 1006 bp, homo sapiens
gattgcttgaggagagaagtatgtgatcagaaagcattctttgtctattaactcctgcccagcaaaagtgaaagaaaattcatgggagcatgcaagaacaaagagcacagcaaagctggacaaacacagcaatccaggcaggggatttccaactcaactctggtatataagctgcatgcaaagtcctttttctgtctctggtttctggccccttgtctgcagagatggctcccaatgcttcctgcctctgtgtgcatgtccgttccgaggaatgggatttaatgacctttgatgccaacccatatgacagcgtgaaaaaaatcaaagaacatgtccggtctaagaccaaggttcctgtgcaggaccaggttcttttgctgggctccaagatcttaaagccacggagaagcctctcatcttatggcattgacaaagagaagaccatccaccttaccctgaaagtggtgaagcccagtgatgaggagctgcccttgtttcttgtggagtcaggtgatgaggcaaagaggcacctcctccaggtgcgaaggtccagctcagtggcacaagtgaaagcaatgatcgagactaagacgggtataatccctgagacccagattgtgacttgcaatggaaagagactggaagatgggaagatgatggcagattacggcatcagaaagggcaacttactcttcctggcatgttattgtattggagggtgaccaccctgggcatggggtgttggcaggggtcaaaaagcttatttcttttaatctcttactcaacgaacacatcttctgatgatttcccaaaattaatgagaatgagatgagtagagtaagatttgggtgggatgggtaggatgaagtatattgcccaactctatgtttctttgattctaacacaattaattaagtgacatgatttttactaatgtattactgagactagtaaataaatttttaaggcaaaatagagcattcaaagccaaaaaaaaaaaaaaaaa

SEQ ID NO: 186 - DNA, 2099 bp, homo sapiens
gaaagaaacaacaactggaaaagaagcactgcataagaccaggatgtctctgaaatggatgtcagtctttctgctgatgcagctcagttgttactttagctctgggagttgtggaaaggtgctggtgtggcccacagaatacagccattggataaatatgaagacaatcctggaagagcttgttcagaggggtcatgaggtgattgtgttgacatcttcggcttctattcttgtcaatgccagtaaatcatctgctattaaattagaagtttatcctacatctttaactaaaaatgatttggaagatttttttatgaaaatgttcgatagatggacatatagtatttcaaaaaatacattttggtcatatttttcacaactacaagaattgtgttgggaatattctgactataatataaagctctgtgaagatgcagttttgaacaagaaacttatgagaaaactacaagagtcaaaatttgatgtccttctggcagatgccgttaatccctgtggtgagctgctggctgagctacttaacataccctttctgtacagtctccgcttctctgttggctacacagttgagaagaatggtggaggatttctgttccctccttcctatgtacctgttgttatgtcagaattaagtgatcaaatgattttcatggagaggataaaaaatatgatatatatgctttattttgacttttggtttcaagcatatgatctgaagaagtgggaccagttttatagtgaagttctaggaagacccactacattatttgagacaatggggaaagctgaaatgtggctcattcgaacctattgggattttgaatttcctcgcccattcttaccaaatgttgattttgttggaggacttcactgtaaaccagccaaacccttgcctaaggaaatggaagagtttgtgcagagctctggagaaaatggtattgtggtgttttctctggggtcgatgatcagtaacatgtcagaagaaagtgccaacatgattgcatcagcccttgcccagatcccacaaaaggttctatggagatttgatggcaagaagccaaatactttaggttccaatactcgactgtataagtggttaccccagaatgaccttcttggtcatcccaaaaccaaagcttttataactcatggtggaaccaatggcatctatgaggcaatctaccatgggatccctatggtgggcattcccttgtttgcggatcaacatgataacattgctcacatgaaagccaagggagcagccctcagtgtggacatcaggaccatgtcaagtagagatttgctcaatgcattgaagtcagtcattaatgaccctatctataaagagaatatcatgaaattatcaagaattcatcatgatcaaccggtgaagcccctggatcgagcagtcttctggattgagtttgtcatgcgccataaaggagccaagcaccttcgggtcgcagcccacaacctcacctggatccagtaccactctttggatgtgatagcattcctgctggcctgcgtggcaactatgatatttatgatcacaaaatgttgcctgttttgtttccgaaagcttgccaaaacaggaaagaagaagaaaagggattagttatatcaaaagcctgaagtggaatgaccaaaagatgggactcctcctttattccagcatggagggttttaaatggaggatttcctttttcctgcgacaaaacgtcttttcacaacttaccctgttaagtcaaaatttattttccaggaatttaatatgtactttagttggaattattctatgtcaatgatttttaagctatgaaaaataataatataaaaccttatgggcttatattgaaatttattattctaatccaaaagttaccccacacaaaagttactgagcttccttatgtttcacacattgtatttgaacacaaaacattaacaactccactcatagtatcaacattgttttgcaaatactcagaatattttggcttcattttgagcagaatttttgtttttaattttgccaatgaaatcttcaataattaaaaaaaaaaaaaaaaaaaaaaaaa

SEQ ID NO: 187 - DNA, 1224 bp, homo sapiens
atttcctttccggcggcgcgctgtcgtcacgcgtcccgcgcctcctcgcgcctgcgccgtggttggaaggtcgtccctgtgaccggcttggcggttggagcggctgtcgccatgttgtcggtagcatcccgctcaggcccgttcgcgcccgtcctgtcggccacgtcccgcggggtggcgggcgcgctgcggcccttggtgcaggccacggtgcccgccaccccggagcagcctgtgttggacctgaagcggcccttcctcagccgggagtcgctgagcggccaggccgtgcgccggcctttggtcgcctccgtgggcctcaatgtccctgcttctgtttgttattcccacacagacatcaaggtgcctgacttctctgaataccgccgccttgaagttttagatagtacgaagtcttcaagagaaagcagcgaggctaggaaaggtttctcctatttggtaactggagtaactactgtgggtgtcgcatatgctgccaagaatgccgtcacccagttcgtttccagcatgagtgcttctgctgatgtgttggccctggcgaaaatcgaaatcaagttatccgatattccagaaggcaagaacatggctttcaaatggagaggcaaacccctgtttgtgcgtcatagaacccagaaggaaattgagcaggaagctgcagttgaattatcacagttgagggacccacagcatgatctagatcgagtaaagaaacctgaatgggttatcctgataggtgtttgcactcatcttggctgtgtacccattgcaaatgcaggagattttggtggttattactgcccttgccatgggtcacactatgatgcatctggcaggatcagattgggtcctgctcctctcaaccttgaagtccccacgtatgagttcaccagtgacgatatggtgattgttggttaagagacttggactcaagtcataggcttctttcagtctttatgtcacctcaggagacttatttgagaggaagccttctgtacttgaagttgatttgaaatatgtaagaattgatgatgtatttgcaaacattaatgtgaaataaattgaatttaatgttgaatactttcaggcattcacttaataaagacactgttaagcactgttatgctcagtcatacacgcgaaaggtacaatgtcttttagctaattctaattaaaaattacagactggtgtacaagatacttgtg

SEQ ID NO: 188 - DNA, 3844 bp, homo sapiens
agcactcattggacttcagcatgactactcagttgccagcttacgtggcaattttgcttttctatgtctcaagagccagctgccaggacactttcactgcagctgtttatgagcatgcagcgatattgcccaatgccaccctaacaccagtgtctcgtgaggaggctttggcattaatgaatcggaatctggacattttggaaggagcgatcacatcagcagcagatcagggtgcgcatattattgtgactccagaagatgctatttatggctggaacttcaacagggactctctctacccatatttggaggacatcccagaccctgaagtaaactggatcccctgtaataatcgtaacagatttggccagaccccagtacaagaaagactcagctgcctggccaagaacaactctatctatgttgtggcaaatattggggacaagaagccatgcgataccagtgatcctcagtgtccccctgatggccgttaccaatacaacactgatgtggtatttgattctcaaggaaaactggtggcacgctaccataagcaaaaccttttcatgggtgaaaatcaattcaatgtacccaaggagcctgagattgtgactttcaataccacctttggaagttttggcattttcacatgctttgatatactcttccatgatcctgctgttaccttggtgaaagatttccacgtggacaccatagtattcccaacagcttggatgaatgttttgccacatttgtcagctgttgaattccactcagcttgggctatgggcatgagggtcaatttccttgcatccaacatacattacccctcaaagaaaatgacaggaagtggcatctatgcacccaattcttcaagagcatttcattatgatatgaagacagaagagggaaaactcctcctctcgcaactggattcccacccatcccattctgcagtggtgaactggacttcctatgccagcagtatagaagcgctctcatcaggaaacaaggaatttaaaggcactgtctttttcgatgaattcacttttgtgaagctcacaggagttgcaggaaattatacagtttgtcagaaagatctctgctgtcatttaagctacaaaatgtctgagaacataccaaatgaagtgtacgctctaggggcatttgacggactgcacactgtggaagggcgctattatctacagatttgtaccctgttgaaatgtaaaacgactaatttaaacacttgcggtgactcagctgaaacagcttctaccaggtttgaaatgttctccctcagtggcactttcggaacccagtatgtctttcctgaggtgttgctgagtgaaaatcagcttgcacctggagaatttcaggtgtcaactgacggacgcttgtttagtctgaagccaacatccggacctgtcttaacagtaactctgtttgggaggttgtatgagaaggactgggcatcaaatgcttcatcaggcctcacagcacaagcaagaataataatgctaatagttatagcacctattgtatgctcattaagttggtagaatattgactttttctcttttttatttgggataatttaaaaaatgatggatgagaaaagaaagattggtccgggttaatattatcctctagtataagtgaattactagtttctctttatttagacaaacacacacacaccagataatataaacttaataaattatctgttaatgtagattttatttaaaaaactatatttgaacattggtctttcttggacgtgagctaattatatcaaataagtatcacaaatcttttacgcagaagaaataaaaactacgggtagaaaacataagaactatcataaaatttacttacaaggaggctgctcttgttaccacttttattatattacgtatcacttattcagctctgctgaaaatttccaatgactttgtttgtttgctctttttgttttttacctaaacaatacattttgattctcttgtgggttgataatgtctccccaaaatttacatgttgaagcacctcagaatgtgactgtatttggagacagggtctttaaagaggtaaaataaggtcattaggatagaccctaattcaatatgactgatgatcataaaagaagaggcgagtagggcacaacaggcacaaagggagaccataaggagacacagaggaaggacaactctttacaagctaagaagagagggcctcagaagaaaccaaccctgccaacaccttgatcttggacttccagcctccaaaactatgagaaataaatttctattgtttaagtcacccagtccatggtactttgttaggcagccctggcaaatgaatcaaagacccattcctgttcctctccccaccactactgttttctactgtaatctgaagcttcaacaaaaggcttacctggtaagaatattcagctggtctgggtcctcaagactccaatagacactcttagagaaggattgctgatggattgatagtgaaaccattagatcattgaattcctctggaattagaaaaccagagagtcccattttaagaaattagatatttaatatagcattgtgtgttctattttagtaacagcagaatctcttgacattacacaactcagtgaaacaacatcatttaagccaaaatatctcccaactgactgatagactctgagcactaatatcatagtgctgtgatgatggacaattacatagtaccgataacagccatgcactgtgcaaagcatgcccttctgcacaggagagcaaggcacttgcagtagtgatctatgccagcaaaacatcattttgagacaaacatttttgtggcagatgtttttcctaaaaagtactatatcatccaagaaatatttgagtaaaatcccttgttcttttgggtgacattaactgacatttgctttttttcaagacctaatagaaaataagaaagcccataatgtatttagaaacaggaatcctcagagcaattctctgtattctcatataatttcaatgtaaaacagaaaacatattgatgtgttggtgataggcttgaattattaaaaacttcaaaaacatcctaagtgtttcttttttgctcaacgttgtcaactatagtaggtctcccttgtggtgtaatgaattgcccccaaactattatcttaaaacaacaaacatttattatcttatagcatttctgagggtcaggatctgggactggcttagtggagttgttctggatcagggcctttggaaagttgtagttaacttgtccccagggctgccatcatctcaaggctcgggtggggctggagaaaatctgcttctcagctcactcacggcggttgccaggcctccattctttaggatgctagaaaaactttcataaaatgtcatctggcttctcctagagcaatgatactgagagagaaagcacatgagagaaagagcgagggaacttggatgtaagccacagtctttgaaaacctaatcacagaagtgacatctcttcttccacatgatgttggtcacatggaccaacaatggcacaacgtggacagaatcaaacagagttgagaatatcaggaggtggggcttcatgggggccattttggatgctatcatagtgaatatatgtatttatatttatatctgtatatattgcaatgtaatttaaaaaataggattgttttccttttctttttgctatatgtgatatgtatttcaaaatacactcccaatagttacgtctgaaaagcactacactaaaaaactttctatacattgaataattaaattaaataatctaa

SEQ ID NO: 189 - DNA, 2003 bp, homo sapiens
gcctcaagaggcggatattaacctcccaggacggaagttccggagccttcaaactctcggggaagcaactcggcagcggaccaagatggcggcgccctgtgagggacaagcgtttgccgtaggggttgaaaagaattggggtgcagtagttcgctccccagaagggaccccccagaaaatccggcagctgatagatgaggggattgccccggaagagggaggcgtggacgcgaaggacacgtctgccacatcccagtcagttaatggatcaccccaagcggaacaaccttcattggaatctacaagcaaagaagccttctttagcagagtggaaacattttcttctttgaaatgggcaggtaagccctttgagctgtctccactcgtctgtgcaaaatatggctgggtcacagtggaatgtgatatgctcaagtgctctagctgtcaagcttttctctgtgccagtttacaaccagcttttgactttgacagatataagcaacgatgtgctgagctgaagaaagccttgtgtactgcccatgagaagttctgtttctggccagacagcccatccccagaccgatttgggatgttgcccctggatgagcctgctattcttgttagtgaattcctagatcgttttcaaagcctttgtcacttggacctccagcttccttccctaaggccggaggacttgaaaactatgtgcttgacagaagacaagatcagtcttctcctacacttgcttgaagatgaacttgatcaccgaactgatgagagaaaaactacaatcaaattaggctcagacatccaagtccacgtcactgcctgtattctctctgtgtgtggctgggcgtgtagttcctctttggaatccatgcagctctccctgataacatgttcgcaatgtatgaggaaggtggggctctggggcttccagcagattgaatcgtccatgactgacctggatgcatcctttggcctgaccagctccccaatcccaggccttgaggggcgaccagagcgcttacctctggtgcctgaatctcctcggaggatgatgacccggagccaggatgccactttctccccaggctcagagcaggctgaaaagagccctggtcccattgtctctcgaactcggagctgggactcttccagtcctgttgaccgtcctgagccagaggctgctagccccaccaccagaactcgcccagtgacccgaagcatgggaacaggagacacccctggcctggaggtaccatctagccctctgcggaaagccaagcgagctcgcctctgctcctccagcagttcggacacatcttcccgaagcttctttgatcccacctctcagcatagagactggtgcccttgggtgaatatcacacttggcaaagaaagcagggagaatggtggaactgaaccagatgccagcgccccagcagagccaggctggaaagcagtgctgaccatcctcttggcgcacaaacagtctagccagccagctgaaacggactccatgagtctctctgagaaatcaaggaaagtattccgaatatttcggcagtgggaatctctgtgctcatgctgaagatactccagcgccttcctggagatagctggaatgagagtgactttttgaaaaattaaggctgagttcctttcggtcagctgacactaagtttttcctgttctgggttaatcataaggagccccctgccatagcaaaggcagtgagtgtcaactatctgcatctggctgagagagacccgtttcctttcagggatgtggacagggtaagggcagcaagcatggttctgttaaaggagtgtgggattaacagactagaaggaagactaaggacctgaccacccatttcagcatcttcaatgtggagcagtgttctgaggactcttctatcctaggactatgacagtgtgtattaataaaatatttgctaagattctcaaaaaaaaaaaaaaaaaaaaaaaaaaaaaaaa

SEQ ID NO: 190 - DNA, 2296 bp, homo sapiens
gattggccgcactagcccgctcgtcacgctcttttgtctcagctggcagaggataaaagccgccgcggctgccttaggaacggcgctgcctcgtctctgctacccctggttgggcggccctgcgaagcagctccttcgggcagccccgggtcgcttagcggccaaggaggcttcagttctttgccgcctgcaaggcggagaccagaaggcggaatccacagctggcgacgcgggagcatctgctgtccaccagcggagcacaggccatcaaagccgcatctgaacttgaattctgtgcagctgattgcagagctggacccggatctgcgaccccctgtggacagaggttgaccgtaccccggagaggagctttctcacggagggcactggttgcagaggctggaagtgaaataaagacgcgctcttgtttcagagttcgtcccctgctgagataggaaggcagagccacctcctctcctctcccacctgcagattaagcttttctaaaaagcctaggcatcttcttatattcagataccctatcgtcgtcagtcatggctagcatcattgcacgtgtcggtaacagccggcggctgaatgcacccttgccgccttgggcccattccatgctgaggtccctggggagaagtctcggtcctataatggccagcatggcagacagaaacatgaagttgttctcggggagggtggtgccagcccaaggggaagaaacctttgaaaactggctgacccaagtcaatggcgtcctgccagattggaatatgtctgaggaggaaaagctcaagcgcttgatgaaaacccttaggggccctgcccgcgaggtcatgcgtgtgcttcaggcgaccaaccctaacctaagtgtggcagatttcttgcgagccatgaaattggtgtttggggagtctgaaagcagtgtgactgcccatggtaaattttttaacaccctacaagctcaaggggagaaagcctccctttatgtgatccgtttagaggtgcagctccagaacgctattcaggcaggcattatagctgagaaagatgcaaaccggactcgcttgcagcagctccttttaggcggtgagctgagtagggacctccgactcagacttaaggattttctcaggatgtatgcaaatgagcaggagcggcttcccaactttctggagttaatcagaatggtaagggaggaagaggattgggatgatgcttttattaaacggaagcgtccaaaaaggtctgagtcaatggtggagagggcagtcagccctgtggcatttcagggctccccaccgatagtgatcggcagtgctgactgcaatgtgatagagatagatgataccctcgacgactccgatgaggatgtgatcctggtggagtctcaggaccctccacttccatcctggggtgcccctcccctcagagacagggccagacctcaggatgaagtgctggtcattgattccccccacaattccagggctcagtttccttccaccagtggtggttctggctataagaataacggtcctggggagatgcgtagagccaggaagcgaaaacacacaatccgctgttcgtattgtggtgaggaaggccactcaaaagaaacctgtgacaacgagagtgacaaggcccaggtttttgagaatttgatcatcactctccaggagctgacccatactgagatggagaggtcaagagtggcccctggcgaatacaatgacttctctgagccactgtaagggaccacccccaggtttcagtgaacccttacctatattcagcatccagtagtgggaaaactggggtgggggtgggggtgggacttctaactgcatgaattaatccacaaagcggctatcttttggggtggagtagaaagggtcttggataccagcacattggagggagatagcctgacctctgtccttgctccttctccctgcagcctacgggtctgttttctgtgtgtgcccatttccttgacagctttattctttgtgaaagtggtataatttattgttaaatatttgaacaataaaaaaggtacaaaaagtgaagtacaaattacccaaatctctccacccttatataatcattgtcaaccctttgatgagtgatatttccctatacctatgtacccagatagatatatgcatagataaaagtgatgaaatataagtgctgttctatctgtattttttcaccaaacaatatatgttgtgagcttctatgtcaataaatatatatatcagcatctgcaaaaaaaaaaaaa

SEQ ID NO: 191 - DNA, 1680 bp, homo sapiens
gttgctatttcatttaccacagtagtttgagtcatttccacatcttgcgagtccttccgaacgagtctcctttccttggggctcgcaaccacccaatgatcgattcaggagaaaagaagcctgggcggagagcagaggaggcagtgaccttcaaggatgtggctgtgatcttcactgaggaggagctggggctgctggaccctgcccagaggaagctgtaccgagatgtgatgcttgagaacttcaggaacctgctctcagtggggcatcaaccattccatggagatactttccacttcctaagggaagaaaagttttgggtgatggggacaacaagccaaagagaagggaatttgggaggcaagatccaaactgagatggagactgttccagaagcaggaacacatgaagaattttcctgcaagcaaatttgggaacaaattgcaagtgacttaaccaggtctcaagataccaccataagtaactctcagttatttgaacaagatgacaacccctcccagattaaagcaagactatctacagttcacacaagagaaaaacctttccagggtgaaaattgtaaacagttcttcagtgatgtttccttctttgatcttcctcagcagttatattcaggagagaagtctcatacctgtgatgagtgtggaaaaagcttctgttacatctcagcccttcatattcatcagagggtccacatgggagtgaaatgctataagtgtgatgtgtgtggtaaggaatttagtcagagctcacgtctgcaaactcatcaaagagtccacactggagagaaaccattcaaatgtgagcagtgtgggaaaggcttcagatgtagatcagcacttaaagttcattgcaaattacacatgagagagaaaccttataattgtgagaaatgtgggaaggctttcatgcacaatttccagcttcagaaacatcacagaattcatactggggagaagccattcaaatgtgaaatatgtggtaagagcttctgtcttaggtcaagtcttaataggcattgcatggtccacacagcagagaaactgtacaaatctgaaaagtatggaagaggtttcattgataggctagatttgcataagcatcagatgattcatatgggacagaaaccatataattgtaaagaatgtgggaagagcttcaaatggtcctcatatcttttggtccatcaacgagtccacactggagaaaagccatacaaatgtgaggagtgtgggaagggctacattagtaagtcaggtcttgacttccaccatagaacccacacgggagagagatcttataactgtgataactgcgggaagagctttagacatgcttctagtattttgaatcataagaaactccactgccaaagaaagccattgaaatgtgaagactgtggaaagaggcttgtatgccggtcatactgtaaagaccaacaaagagaccacagtggagaaaacccatccaaatgtgaggactgtgggaagcgctacaagaggcgcttgaatctggatataattttatcattatttttaaatgacatataagttatacatatttatggagtgtgaaatttgatacatgtatataatgtgtgctgattaaatcagtttaatttcacctgaaaaaaaaaaaaaaaaaaaaaaaaaaaaaaaa

SEQ ID NO: 192 - DNA, 2181 bp, homo sapiens
gagagcggcggaagtaggaagccgaggtctgaattgcgcgtggtggccatggcggccagcggggctgtggaaccagggcccccgggggctgccgtcgccccgtcgcccgccccggccccgccgcctgcccctgatcacctgttccggcccatcagcgccgaggacgaggagcagcagcccaccgagatcgagtcgctatgcatgaactgttactgcaatggcatgacgcgcctcctgctcaccaagattcccttcttcagagaaataatagtgagctccttttcctgcgagcactgtggctggaacaacacggagatccagtcggcaggcaggatccaggaccagggagtgcgctacactttgtctgtcagggctctggaggacatgaacagagaagtggtgaagactgactctgctgccacaaggattcctgagctagattttgaaattcctgcctttagccagaaaggagctctgaccactgttgaaggattgatcacccgtgctatctctggcctggagcaggaccagcctgcacgaagggcaaacaaagatgctacagctgaaagaattgatgagttcattgtcaaactgaaggagctaaagcaagtagcctcccctttcactctgatcattgatgatccctcagggaacagttttgtggaaaacccacatgctcctcagaaagatgatgccctggtgatcacacactacaaccggacccgacagcaggaagagatgctggggcttcaagaagaagcaccagcagagaagccagaagaggaagatctcagaaatgaagtgctccagttcagcacaaactgcccagaatgcaatgcccccgctcagaccaacatgaagctagtacaaatccctcactttaaggaggttatcatcatggctaccaactgcgagaactgtgggcatcggaccaatgaggtgaaatctggaggagcagtagaacccttgggcaccaggatcaccctccacatcacagatgcctcagatatgaccagagacctcctcaagtctgagacttgcagtgtggaaatcccagagctagaatttgaactgggaatggcagtcctcgggggcaagttcaccacactggaagggctgctgaaagacatccgggaactggtgaccaaaaatcctttcacactgggcgacagttccaatcctggacagacggagagactacaggagtttagccagaagatggaccagatcatcgaaggtaacatgaaggcccactttattatggatgatccagcaggaaacagttacttgcagaatgtgtatgcgcctgaagatgatcctgagatgaaggtggagcgttacaagcgcacctttgaccaaaatgaggagctagggctcaatgacatgaagacagagggctatgaggcaggcctggctccgcaacggtagcagtgggtggctcaagggccagcctccagcgctgctctttctgtaggttatttattagtattggatgaaggcgaaggctgggagtgtctttcccaccagcccttgcccatggtggggaggacatctggtctgagtcagagatctgtgcacactttctaaacagcttgtgatgcaagtgtgagcctattgtgttacttgaccttattttggaagttttgaattggcctaggaggaaacccagaaatgaaccaggggtatgtcatcacttttttcatatcaagtcctcaccctccttccacataatgctctatcctctaaggttggaactctgaagttggagaaggtggaataaagttacacctggagtttgttgttggttttgagtatataaaatactgactttgaacaggaaaggagtctcctgaggggagaccgagtccagcacaagtgaaggagttaccattgaaatgatgactttcaaacagcactggcctctgtattgaccctatccttgtttgatatcatgctgttagaattcagcctcctaaagaaaattttcccgtgtatctactgtaatttggggattgcagctggcatttaattcattccttcagcagatgcttgcttatctactttatgccaagcacaccacagaacagaggacaaaataaatctctttcatggaacttgaagtctagtggggaaaaatgacaataaacagatcaggaaaacagtaaaaaaaaaaaaaaaaaa

SEQ ID NO: 193 - DNA, 2566 bp, homo sapiens
aaaaaattgctttatggaagaaagtaagtatagacagagagaaagggatctgatgaccaaagcagggaataaatgtttggagtccacggcatcctgagaacttcttgggaatagagtctaggcccccaatgctgtcactctcacccatcctcctctacacatgtgagatgtttcaggacccagtggcttttaaggatgtggctgtgaacttcacccaggaggagtgggctttgctggatatttcccagaagaatctctacagggaagtgatgctggaaactttctggaacctgacctctataggaaaaaagtggaaagaccagaacattgaatatgagtaccaaaaccccaggagaaacttcaggagtgtcacagaagagaaagtcaatgaaattaaagaagacagtcattgtggagaaacttttaccccagttccagatgacaggctgaacttccagaagaagaaagcttctcctgaagtaaaatcatgtgacagctttgtgtgtgaagttggcctaggtaactcatcttctaatatgaacatcagaggtgacactggacacaaggcatgtgaatgtcaggaatatggaccaaagccatggaagagtcaacaacctaaaaaagccttcagatatcacccctccttgagaacacaagaaagggatcacactggaaagaaaccctatgcttgtaaagaatgtggaaaaaacattatttaccattcaagcattcaaagacacatggtagtgcacagtggggatggaccttataaatgtaagttttgtgggaaagcattccattgtctcagtttatatcttatccatgaaagaactcacactggagagaaaccgtatgaatgtaaacaatgtggtaaatcttttagttattctgctacccatcgaatacatgaaagaactcacattggagaaaagccttatgaatgtcaggaatgtgggaaagcattccatagtcccagatcctgtcacagacatgaaaggagtcacatgggagagaaggcttatcaatgtaaggaatgtggaaaagcattcatgtgtccccgttatgttcgtagacatgaaaggacccactctaggaaaaaactttatgaatgtaagcagtgtgggaaagcattatcctctcttacaagttttcaaacacacataagaatgcactctggagaaagaccttatgaatgtaagacatgtgggaaaggcttttattctgccaagtcatttcaaagacatgaaaaaactcacagtggagagaaaccgtataaatgcaagcaatgtggtaaagccttcactcgttccggttcctttcgatatcatgaaaggactcacactggagagaaaccctatgagtgtaagcaatgtgggaaagccttcagatctgccccaaatcttcaattgcatggtaggactcacactggagagaaaccgtatcaatgtaaggaatgtgggaaagctttcagatctgcctcacaacttcgaatccatcgtaggattcacactggagagaaaccctatgaatgtaagaaatgtgggaaagccttcagatatgtccagaactttcgatttcatgaaaggacacaaacacataagaatgcactctggagaaagaccttataaatataagatatatgggaaacacttttattctgccaagttatttcaaacacatgaaaaaattcacactggagagaaaccctataaatgcaagcaatgtggtaaagccttaattgttccagttcctttcgatatctaaaaggactcacagtggagaaaaactctatgagtgtaagcaatgtgggaaagtcttcagatctgtcaagaacctttcaatttatgaaaggacacacactggagagaaaccctatgaatgtaagaaatgtggaaaagcgttccataatttctcttcttttcaaatacatgaaagttgcacagaggagaggcgccctaagaatgtaagcattgtgggaaagcattcatatctgccaagatcgtttgaatacatgcaaaacacacactggagagaaacctatgaatgtaaggaatgcaaacaagcattcaattatttttcttccttgcatatacatgaaaggactcatacgagagagaatccgtatgaatgtaaggattgtgggaaagcattcagcttgcttaattgctttcatagacatgtaaagacacaccagaaggaaaccctatgaatgtaagcaatgtggcaaaagctttcacttcttccagttcttttcaatatcatgaaaggactcacactggggagaaaccgtatcaatgtaagcaatgtgggaaagccgtcagatcagcctcaagacttcaaatgcatggaagcactcacacttggcagaaactctatgaatgtaagcagtatgggaaagccttcagatcggctaggattctttgaatacaaataatgaatgtaaacaattaactgtttataataactgtatactaacaaatgttattctttttaaataattaagaagctataataaaatatccattggtgtcatgtattagatcaagcttaaaaaaaaaaaaaaaaa

SEQ ID NO: 194 - DNA, 1491 bp, homo sapiens
agtttccatggtgagatggtcaacaagcctgtaagttcctcagctacgactaccaggtacctcgggttcctccctcctccgagagaccgccgaggtgcgggctgtgagagggggagcgtggagcctccgaggccgagggatcagtgtccttcagtgatgtggctgtgggcttcacccaggaggagtggcagcatctggactctgctcagaggaccccgtacagagacatgatgctggagaactacagcctcctcctctcagtgggatattgcattaccaaaccagaggtggtttgcaagttggagcatggacaggtgctgtggatattagaggaagagtccccaagtcagagccacctagactgctgcatagatgatgacctgatggagaagagacaggaaaatcaagaccagcatttgcagaaagttgattttgtcaacaataaaacactgactatggacagaaatggtgtattaggaaaaacattttctcttgacacaaaccccattctatcaagaaaaatacgtggcaactgtgactcatctggaatgaatttgaataatatttcagaattaattattagtaatagaagctcctttgtaaggaaccctgctgagtgtaatgtacgtgggaaatttctcctctgtatgaagcgtgagaatccttatgccagagggaaacctttggaatatgatggaaatgggaaagccgtctctcagaatgaggacttatttaggcatcagtatattcaaactcttaagcagtgttttgaatacaatcagtgtgggaaggcttttcatgaagaggcagcctgcagtacccataagagagtgtgctcatgggagaccctgtgaatataatgaacatgtgagagccttttccgatagaccaatattcattgttcatcagagaactcacataaggaagagtcaccatgaattcaatgaatgtgagaggaggtctggtgagaggccacctgtaaataaacaccacagggttatggagatgaaatactatgagtgtaatgcgagtgagaatagttttggcaagaaatcactcctcattctacaaagttacagaggagagaaaacttgactgtagtagacatttggaagtattctgcaagaagccaaatttcactcaacatcaagaaacacatataggaaagaatgcctataaaattaatcagtatgctagtacattttgctgtaagccaaagcattctgtatatcagaaaacagatacagaagaaaaactctatgaatgtagtgaatgtgggaaaaccttcagccataaatcctcttttatcctacagcagaggatacacagaggagagaaaccctatgaatgcactgaatgtgggaaaacttttggatataggtcatgccttgcagtacatcaaagaacacacacgggacaaaacctatgaatgtaatgaatgtggaaaaaacttctgtgagaagtcaaatcttcatgtacatcagagaacac

SEQ ID NO: 195 - DNA, 4071 bp, homo sapiens
gcagcggaacgattcgattcttctcagcaccaagttgcgctcccaatctctcagagctgggctcgcgggaggccgctcgtgcaaaacctaggctgagctcccctgcgcggagctgtgagccctggaacaccgtggtctgcttctcaggacgcgcaaacagtgaagccagtcccgcccgggtgagccgcgggggcctctgggaagcgtcgcccctggtgtaacggaccgagacttgtggcgctctcagccaccgacagcgccggcctcagtgccgcctctgtcccagcccgcgccggctctgccactttggcagcgttaagtgtggaatcggggcctgtgtccgcgggcttggtgagttcttcatatattaaggattcattcattcatagactcatttattgaaggctgtctgtgtaacaggcacaatcctaggtgcttgggatatagcagtgaacaagagacaaaccccctactatcatggtacttacatttttgtgggctggataataaacaagctctacttctgcaggccccatcccttcccagaaagaagaggaaatgactgagtcccagggaacagtaacattcaaagatgtggctatcgacttcactcaggaggagtggaagagattggatcctgctcagagaaaactgtaccggaatgtgatgctagaaaactataacaacttaatcacagtaggctatccgttcaccaaacctgatgtgattttcaaattggagcaagaagaagaaccatgggtgatggaggaagaagtattaaggagacactggcaaggagaaatatggggagttgatgagcatcagaaaaaccaggacagacttttgagacaagttgaagttaaattccagaaaacactgactgaagaaaaaggcaatgaatgtcaaaagaaatttgcaaatgtatttcctctgaactctgattttttcccttccagacacaatctctatgagtatgacttatttggaaagtgtttagaacataattttgactgtcataataatgtgaaatgccttatgagaaaggagcattgtgaatataatgaacctgtgaaatcatatggtaatagctcatcccattttgtcattaccccctttaagtgtaatcattgtggaaaaggcttcaatcagactttggacctcatcagacatctgagaattcatactggagagaagccctatgaatgtagtaactgtagaaaagccttcagtcacaaggaaaaacttattaaacattataaaattcacagtagggagcagtcttacaaatgtaatgaatgtggtaaagctttcattaaaatgtcaaatctcattagacatcaaagaattcatactggagagaagccctatgcatgtaaggaatgtgagaagtccttcagccagaaatcaaatcttattgatcatgaaaaaattcatactggagagaaaccttatgaatgtaatgagtgtggaaaagcattcagccagaagcaaagcctcattgcacatcagaaagttcatactggggagaaaccttatgcatgtaatgaatgtggtaaagccttccctcgaattgcatcccttgctcttcatatgagaagtcatacaggagaaaaaccttataaatgtgataaatgtggtaaagccttctctcagttttccatgcttattatacatgttagaattcatacaggtgaaaaaccctatgaatgtaatgagtgtggaaaagccttctctcaaagctcagcccttactgtacatatgagaagtcacactggtgagaaaccctatgaatgtaaggaatgcagaaaagccttcagccacaagaaaaacttcattacacaccagaaaattcatactagagagaaaccttatgagtgtaatgaatgtgggaaagcttttatacagatgtcaaatcttgttagacaccagagaattcatactggggaaaaaccctatatatgtaaggaatgtgggaaagcctttagccagaaatcaaatctcattgctcatgaaaaaattcattctggagagaaaccctatgaatgcaatgaatgtggtaaagccttcagccaaaagcaaaacttcattacacatcaaaaagttcatactggagagaaaccttatgattgtaatgaatgtggtaaagccttctctcaaattgcatcccttacccttcatttgagaagtcatacaggggaaaagccttatgaatgtgataaatgtggtaaagccttctctcagtgctcactgcttaatttacatatgagaagtcacacaggtgagaagccctatgtatgtaatgaatgtgggaaagccttctctcaaagaacttcccttattgtgcacatgagaggccatacaggtgaaaaaccctatgaatgtaataaatgtggaaaagccttctcccaaagctcatcccttactatacatatacgaggacatacaggtgagaaacccttcgactgtagtaaatgtggaaaagccttctctcaaatctcatctcttacccttcatatgagaaaacatacaggtgagaagccctatcactgtattgagtgtggcaaggctttcagccaaaagtcgcaccttgttagacaccagagaattcatactcattagaaaccctatgaatattgtgaatatggcaaggccatctgaaggaattaacacctcattgcacattacatgatcacttccagagtagaaaactatgaatgtgggatagccttctgaaaaagccacaaatttatgaaacattagagaattcttccaaggtgacaaattatataatgaaaaagctgttaccagaaactttcagcagacatcttattgataatatttaatcagcattctcattgaaatctgaaacaaggtatcttccatcagcataacaacacaacacttgagctcctagccaatgtattaagtaaggaaaacaagtatcaacgaagaactataaaaataacttttatacaagaaataattagaaaatgtgttgatagaaaacctaagaataaacacaacaatgagttaggtctttatcaagttataaaatatgttgaaaggcacaaaagaacacctgaaaaatgatattttgtctgaaaagacttgacattgtaaaaatataatttctctcccaaatcactaagtttaatatacttctgaagtttacatcagttttattttaaggaacttcacaaacttatccaaaaattttatgtggaaaagtaaagaaacacaaatagctgaaacaaacttgacaaagcaagtagagaagacacactctattattagatatatcatgtacttatttaaagctgctgtcatttaaacaatgtattaccaagtgaataaatcaagcagtagtaagatagtgagcattcatacaaaaatccaagaagatacaggaattctgtgtatgacagtgctattgaaatcactggggaatgaatggcttatttaataaatggaaggttcataggagaaaaattttagctttctactttatatcatatacaaaaataaaatccaactaaagaccagaatataaaaagcaaaattttaaaactatgatgaaagtagaatccgttactttagggtaacaagatttctttaaaaaacatgtaaacatggaatagtctgttgaattttggtgtattggcctcacaggcacccacaaatgtacacaaagagatatatatcactgtgttcctgaatcatggtttgtattgcccaaaattggatataacaaatttttatcaattgtggaatagatgaataagtgtgatcatttctgtgataaaatacagaatttagaaacaaaatctacctatagttatatggatagattacaatatataatattgagagaaaaaattaaaatgcacaaaggaacacagtataacatttgtataatttaataagatcttgcaaagaacagtactgtgtattggtcatggatccatatatgacttggttgccttttgggatgtgggaaaggtttggtgggagttgttatatttatctgtaatatttctttaataaaagagtgaaagcaaaaaaaaaaaaaaa

SEQ ID NO: 196 - DNA, 8565 bp, homo sapiens
ttgagaggcggagggggtttccgggatctggcggggcctttgtcttgtgctccagctggagctttggtcccgtattctcggctatttatccccagctgcgggaggccctggtgactctgctgctgcagtgtctggtttccctgtgacctgcaggtactgggagttacatagctaagatgccaggacaccccgaaagccggaaaacgagacgcattctcactatgttgcccaggctggtcttgaactccttccctcaagtgattcttctgcctaatcctcccaaagttcttagattacagggactactggcattcagtgatgtggtcatagaattctctccagaggagtgggcatgcctggaccctgcccagcgaaatttgtatagggatgtgatgttcgagaactacagaaacctggtctccctggctattttatcttattccattcaagaccttttgccagagcaggatatgaaagatttatgccaaaaagtgacactgacaagacatagaagctggggccttgacaatttgcacttagtgaaagactggagaactgtgaatgaaggtaaggggcagaaagaatattgcaatagacttactcaatgttcatcaactaaaagcaaaatctttcaatgtattgaatgtggcagaaattttagctggaggtcaatccttactgaacataagagaattcatactggagagaagccatacaaatgtgaagaatgtggcaaagttttcaatcgatgttcaaacctaacaaaacataaaagaattcatactggagagaaaccctacaaatgtgacgaatgtggcaaagtttttaattggtggtcacaactaactaaccataagaaaattcatactggagagaaaccctacaaatgtgatgaatgtgacaaagtttttaattggtggtcacaactaactagccataagaaaattcatagtggagagaaaccatacccatgtgaagaatgtggcaaagcctttacccagttctcaaaccttacacaacataagagaattcatactggagagaaaccctacaaatgcaaagaatgttgcaaagcctttaacaagttctcaaaccttactcaacataagagaattcatactggagagaaaccttacaagtgtgaagaatgtggcaacgtttttaatgagtgctcacacctaactagacataggagaattcatactggagagaaaccctacaaatgtgaagaatgtggcaaagcctttacacagtttgcaagccttactcgtcataaaagaattcatactggagaaaaaccctaccaatgtgaagaatgtggcaaaacttttaatcggtgttcacacctaagtagccataagagaattcatactggagagaaaccctacaaatgtgaagaatgtggcagaacctttactcaattctcaaacctcactcagcataaaagaattcatactggagagaaaccctacaaatgcaaagaatgtggcaaagcgtttaacaagttctcaagccttactcaacataggagaattcatactggagtgaaaccctacaaatgtgaagaatgtgggaaagtttttaaacagtgctctcacctaactagccataagagaattcatactggagagaaaccctacaaatgtaaagaatgtggcaaagctttttaccaatcctcaatccttagtaagcataagagaattcatactgaagagaaaccctacaaatgtgaagaatgtggcaaagcctttaaccagttctcaagccttactcgtcataaaagaattcatactggagagaaacgctacaaatgtaaagaatgtggaaaaggtttttaccaatcctcaatccatagtaagtataagagaatttatactggagaggaacctgacaaatgtaaaaaatgtggcagtctttaaaaactgcttcattatacatggcttcactaatttcatactgaataaaagtggtatgagcataatgactgtttaaggatgtttcacaaaatgtaagcttcagagtgcacaacactatactgaatgaaatttataaatataaaagattacaatatctttatttcaaagatcttcctgtaaacagaatctgtactagaggaaaaacccttaaacaattattcagactttattcaactttagaggattttacgggggcaaaaaacctcctacaaatgtggaaaaacattttttcaagatatatgccttagaaaacaccagagtttatagtatagtagaatatattttacagatacagtgaatacaaacaaatgtccaaaattaagtctaaataaaacattacataatttactgtagaaagtactaaggcactaacagtttcagatgttactttaaagcagtgttgattgtcgagaataattcaaagttaaaatagataatttagttgtatgtaaatttaaatgaatcaagagatgatgtctttttgaagcacagttacattcatgttatacttttttgcattaaaagtttttatatttttgattatatattttaatattgatataattcatatctcaaataacttgatttttattatatttattgtttatgttaaagtatgtggtcagttgttgctgcataagagctatgagaagttcttctatattagatgaccatcatttatatgctttttcatgaatgattaagggcaccgaaatgtaacatttataaggaaaatctaagtagaaatgctttttgttgatgtataacagtgttttaagtaacacattaggtattcagagaagtattttgcattatagtaatagggaaacattttgaatttcagtagtaaattgttttatgagttgcacattaagataatacagtagcttttgaaatgttatttttagaatgcaatttcttttcataaaacaaaattatttttaatgtgttaagaatattttgcattgaatgaagtatatcttgccacaataattaacctataccaccttacccaaagttgtaggtaacagatagtaacaatacactactgggtaacagtgaaaggacacctctagtaatctcttttcccagtggcttttaatttcaaacaacttggggaggttttttttatgtgatatgctttggtttttttgtgccttacctcatgttgaaatgtgttcccccatgttggaggcggggtctagtggaaggtgtttaggtcatgggtgtagattactcatgaatggattggtgttcttaccactgcagttagtgtgttctctgttagttcatgtgaaagctggttgttaaaaacaaaaacaaacaaacaaaaaactgatattcctcttgctttgtcttttgccatgatacccctttgccttttattatgcataaaagcttcctgaggcctcatcagaagttaagcagatgttgatgtcatgcttgtatagccaacagaactgaggctaataaacctcttttctgtattaatttgccagtgttaagtattcccttctagcagcacaaaatggactaacatcccataggttatatttttatttttttcttttgtaaatactggacaatgatactcttatataatcttcagtataaccattataattgcccactataaaggagtataatgaaaggccatgtattttgaatcacgaatgactatttacaaaatgtcatactacgtttttctttgagcctgtgacccctctggcctgtaaaaacacatacatacatttagttttgattaacatggagttaattttataagtctgtcactctaaacataagtgttagctttaagagaattacagagcatgtaattgtgtttgagtgtaggtgtgtacttttttgagaagaaaacaaaaatattggaacaaaatataatttaaaaagtattggtaatttactagcaaactaggaatctcaaagattctgaaagtaaatatttattctctgctttgtattgaatttacttctgtaaaatcttatggctgctggctcagaatcttctcatgcaaatcctgtttttttcttgtctgttgatcatactaaacctaatgtatagttttctcattccaaagttcatgaaattttctctatattcctgagaaattctaagaataactttcataaaatgtattgatgttcacaagataattttaagatgtaattctacaatatgtgtgttactacattttatttaattagtatattttatttttgtatttcaattggagaaccctattttggccaatttttacttggtttttgtttccattttaatattttacataattgaatttttttcactttattgagccattttgtttagatgtacactgggaaggcttcataattcacaaagttgttttgacatataaatgaggtgaacaaacacaggaaagtgctaggtttcctgggggtataatagatgctctataattagcagtaaatattcttgtttaagtcactttttggctacaagtaagagattagaaatattcagcataaagagatggcattaactctgcatgtaaagaaaacacatgtatacccaggctgtacaactgcctctgaaattaagaggaattgtgtttatttcatagttatctctggtacttcactgttattttattttcacccccaactatgcgtcaatcatagccctttcccttctttgcttattatggctacagatttctcactgttctctgcagcccatgtaatttcatacagtattttgtaggttgtgataaggaatttgaaatttttaatatagtgaaaaattggatttaactggagagtttgaggacatttttaagttagaaatgcaccatttgaatcatttaattggcataattgggatgtactctacacagtttataggattaaattactgagttagtaatgtttgtatgaaagaaatgttattagattctaccacaaaatatagtaaacatgaaatcagttagaataggtaaagcattaataatggtaggctatatatcataatcactatataaagaaacatcagaatttggaaaccccttaagcaaaaatatatcttagaaatcttaaggacacttaatggcaagcaaaaaagtttaaatttagttttttataaattacatatagcacaatttatgtgtacatgtagaatcttttagtttttagtgtttatgtaatatattagacaataataaacatttacatttatgtttacatttatatttaatttttcaaatttaatttaaatttctaaatgcttctgtggatttaaattttggaataatcttttcttccccattgatactggaatcttgggaagtttcttactcatatcacaatatgttttatttaaatggatgcagcttacattgcagagtttatataaataatcacataacaagccaattccttagtcattttctgtattaaaaaactcagagatctagagagcttttggattgaaatatttccttggtgattttggatgcaaacctgatttctgtgttcacaccatggccagagatgggactgttagcaccacctgcttctttaatgtcgtccatatgatcagcatcagcaccagaaactccaggtgtcccaaacttaaagtgaaagccatagagtcctttggtgactcccatgttctgtgctggttctagaacatgctggtaaatatcagagtttctatgcttatggctgataagtagacatttttaaaaatcataaaaactgtattttctatatagttcagctaagtttatgaaaaagatgcagactcagtatttggagcattgctatcgctccatgatgtgtttaaaaattatttttaaattgacaaaattttatatctacatatatatatatcttgtaacacatgatgtttgaaatgcttaattctagccaattaaaaatgctttacctcaatagttatttttattgtgagaaaggtcaacatggtcttggcacttaaaaaaaaaaaaacaatatattctcaataactgtattcactctgcactacaataggtctcttgaactaattcctcctagctaacaggcattgtttatcatttaacagataattctctaagcccccttctcctaaaacttcagcatctcttaaccttctttctagtctctacttttatgagatcaacttgtttagattccacgtgagtgagaccatgaggtattcatctttctgtgttctgctccattggtctatttatctgtttttaatgccagtattggactgtttcagttactgtagctttgcagtatatttgactgtcaagtagtgcagtgcttccaaccttcagagtcttttactgtactatatgaatttttgtgttttttttgtgaaaaattttattgatattttgatagacattatgttaaatatatacatcattttgtgtaacatagactttttagcaatattaatttggccaatttatgaataagggataacttttcatttatttatgtttaattttatacctcagttttctttagcttttaatgtagagatctttaacatttttgaataattttatttggaagtaaactttctgtaactattgcaggtgtcaattgttttctttatttctttttcagatagtttgttgttagtgtatagaaatgctactgacccttatatcttgattttgtatcctgcaactttagtgaatttattctaagtatttttaaagttttctatttataagactatgatatctgcaaacagggacaattattttctttctttccaatttggttgtctttggttttgttttctaatttctctggcctggaaattcagtagcatgttaaataagagtgatgaagttagatatatttgccttactataactcttagaaaaaaggcttacaacttttgaaggtttagcatgatgtcagatgtccatttgtcatatatggcctttattggcttgaggtatgtatgttctatatgtaatttgttttgagattttgtcataaagtaatgttgaattttctaaaattctttttctgcattcacttaaaagttataattggttctgagatccttcatctttctcagaatctaggaggatgcatctgtacctagaggaggacacaaaggcatcatatgttacattctcgtgacatataatgtctactgcttataatgtctactgtgagtttctgactccccaaatgaaattgaggcccagaaactttcaactgctttgttcgttgaataatgccaagtgtctggaaatgtgactattcagattaaatgcttaatgtgtgtgtgttgactaaataaatctcaaccagaaccttctcagatattttgttgaacgtgggacctttgtttttttttgttgttttgttttgttttgtttttgttgttgttgttgttgttgtttaccagcaggggacccctgttttgtctatgtcaagaacaaagaccaggcaaaagaaatgtcaagccgcatttacaaatgcaaaaatggacttgtttttgatatgcttttcccaacaataagggacatgagtcattggggcatgttacagagagtttcagtaaaattcagaaaaaaataataaatatgaacagccacagcatgcccagaagcctttttatggagccaggcatggttgacctgctttccatgtctcaaaacattagtccctacaagaaccctatgaggtttatcttcttttcacccattttgagagaagaaaagttcagctcagagagctgcaggaacattggggacatctccaagtcacagccaataggtggcagtcatcagtgtgtcttggaagggacaaacattgagcttctgaacagctactccagaaactatggtgctgtggtgaagtcctggttaggagcctaggaaaatggtgaaggaaaagatggtcccagcctgcaaagctgaagtcaggaacccaccaggatctcccttctccctagcctggtggtccacatcatgcagatttactctagattcagcttagactcatttttatactactcgggggacaaggagggaactacagtcagtaacagcagcatgagcctcaggtgctttggggattgaaattcagaccaggaaattccaatacatcagtgcatgtggaggacatgagtatttaaggagaaggttctaggcttccgaagtaaaattggatgtggaggttggggattgattcaaacattaatactttcaagcgtttctatggtatttgtcagctgtggagcaacagcacacatctgtattaatagcctgtgttaagagattactgtgaatcctgaaaaacatcctcattgtagagatgagaaaacacaggcttttgcacatccaatgtctccttaaagcatgtggttcagaattgagaacgtgcagagtgagagtggtatgaattttcctgtaagctacctgaagttctgtttgctgtcatgtggaagaaaagagccttggagaagttttatttttttctgtttggaaagaatacacagagcaagatgatttacaataaaccttttgacctaacgcacaaaaaaaaaaaa

SEQ ID NO: 197 - DNA, 2108 bp, homo sapiens
atgggaaatgtggtctccgacggatggcctacacccgggaggagtccaggaactctaggtggacagttacttccgcacacgcgtagtaggacggtagccggtattcaatcttcaaatcagcgccgcgggaagtgcgggcgggtgttgctcccctgtctctggacgacgctgtgactgatcccaggcttggagccggagctgcgagcgaggcagtgaaagggtggcagatttctgtgtaagagctgcagaaaatgatcagcttccaggaatcagtgacattccaggatgtggctgtggatttcactgcagaggagtggcagctgcttgattgtgctgagagaaccctgtattgggatgtgatgttggagaactatagaaacctcatctcagtgggatgtccaattaccaaaacaaaagtgatcctcaaggtagagcaaggacaagagccatggatggtggagggagcgaatccacacgagagctctccagaatctgactacccacttgttgatgaaccagggaagcatcgggaaagcaaagacaattttttgaagtcagttttgctcacattcaataaaattctgactatggagagaatccaccattataatatgagcacaagtcttaatccaatgagaaaaaaatcatataaatcgtttgagaagtgtttgccacctaatttagacttacttaaatataatagaagttatactgtagaaaacgcttatgaatgcagtgaatgcgggaaagccttcaaaaagaagtttcatttcattagacatgaaaaaaatcatacaaggaaaaaaccttttgaatgcaatgactgtggaaaagcctatagcaggaaggcacaccttgcaactcatcagaaaattcataatggagagagaccctttgtgtgcaatgattgtgggaaggcgtttatgcataaagcccaactcgtggtccaccagagacttcacactggagagaagccttatgagtgcagtcaatgtgggaaaacattcacttggaactcctcatttaatcaacacgtgaaatctcatacacttgagaagtcatttgaatgtaaggaatgtgggaaaaccttcaggtatagttcatccctttataaacattccagatttcatacaggagagaaaccctaccagtgtatcatatgtggcaaagcttttggcaacacatccgtgcttgttacacaccaaagaattcatacaggagagaaaccttacagttgtattgaatgtggcaaagccttcatcaagaagtcccatctcctcagacatcagataactcatacaggagagaagccctatgaatgtaacagatgtgggaaagcattttcccagaagtcaaatcttattgtacatcagaaaattcatacataatattcactttatgaatatgagaaggccttattaaatatttgctaaatcttattaaatactaaagaattcatggtgagaagtctacaatttaaatgaatttggaagagtagattcccataaaaaacaaccaatgccaatcatgttctggaagtgataataaactttttacagaaaatatgacagaaaacaactataaataatagagcataaagcttggaaagtaagcataacttaaaaaatcaaagaaccagtgaaaactacatttgccattcctgacttttaatttttataataaaataattatgcaagtgtgagtttaaaatatatgcttatacattatattaaagtatgcctattaacagtttctgcagtaaataacattttttcttccagtctcaacatacataattaatcaagtgagaaaatgtgttttaatatgtcatatgaatttcagtgatattttcatccatttgctggcacttttaatgggcatgacagtgtttctgaatctgagtctcctttaattatacaagtgaagacttcttattaaaattaatataaagatattttcctatgtatgtaaataccagaacaaaaaacaagacactaattgaggagagaaaggcacttgtattctgtattacagtaagtattcagttgaggaaaagaattatttaaatatgtaaataaataatttgcacttcaaataaaaaaaaaaaa

SEQ ID NO: 198 - DNA, 5210 bp, homo sapiens
ctttttgcttctctgcgcccagagctccagtccttctcttcactgctctgcgtcctctgctcctggaggccaagcctctgtggccttgtgtcctgcaagtattcgcagatttatggctaaaagaccgggaccccctggaagccgagaaatgggactgttgacattcagagacatagctatagaattttctctggcggaatggcaatgcctggatcatgctcagcagaatttatatagagatgtgatgttagagaactacagaaacctggtctccctgggtattgctgtctctaagccagacttgatcacctgtctggagcaaaataaagagccccagaatataaagagaaatgagatggtagccaaacacccagttacatgttctcatttcacccaagaccttcagtcagagcagggcataaaagattcactccaaaaagtgatactgagaagatatggaaaatgtggacaggaggatttacaagtaaaaaaatgctgtaaaagtgtaggtgagtgtgaggtgcacaaaggaggttataattatgttaaccaatgtttgtcagctacccaaaacaaaacatttcagactcataaatgcgtcaaagtctttggtaaattttcaaattccaatagacacaagacaagacatactggaaagaaacatttcaaatgtaaaaacgatggcaaatcattttgcatgctttcacgcctaaatcaacatcagataattcatactagggagaagtcttacaaatgtgaagaatgtggcaaatcctttaactgctcttcaacccttactagacataaaagaattcatactggagagaaaccctacagatgtgaggaatgtggcaaagcttttagctggtctgcatcccttactaaacataagagaattcatactggagagaaaccttacacatgtgaagaacgtggcaaagtctttagccgctcaacacttactaactacaagagaattcatactggagagaaaccctacacatgtgaagaatgtggcaaagcctttagccgctcttcaacacttactaaccacaagagaattcatactggagagagaccctacaaatgtgaagaatgtggcaaagcctttagcttatcctcaacccttaagaaacataagatagttcatactggggagaaactctacacatgtgaagaatgtgggaaagcctttaccttctcctcaactctaaatactcataagaggattcatactggagagaaaccctacacttgtgaagaatgtggcaaagcctttagcttaccctcaaccttcacttaccacaagagaactcatactggagagaaaccctacaaatgtgaagaatgtggcaaagcctttaactgctcctcaacccttaagaaacataagataattcatactggagagaaactctacaaatgtaaagaatgtgggaaagcctttaccttctcctcaactctaaatactcataagaggattcatactggagagaaaccctacaaatgtgaagaatgtgaccaaacttttaagtggcattcaagtcttgctaatcataagaatatgcatactggagagaaaccctacaaatatgaataatgtggtaaagtccagccctcaggccttataatacataaaataatttatactggaaaaaatcactacaagtgtggagaatgtggccaattctttaaccagttccaaaccactgctgtccataagataattcatattggacaaaagtcttataaatgtaaaaaaaaaagtaacagcctttaaccacccctcaaaccttaatgaacccaagagaatttatttaaaaaaatttttttgagacagagtctcactttgtcacccaggctggagtgcagtggcacgatgtcagctcactgcaacctctgcctcctgggttcaagcgattctcctgcctcagcctcctgagtagctggaattacaggcacgtgcaaccacactggctgagttttgtatttttagtagagatggggtttcaccattttgaccaggctggtctcaaactcctgacttcaggtgaaccacctgcctcagcctcccaaagcctaagagaatttatattagagagactctacaaaggtcaaaaatgtgacaaaacatttaagcacatctcaggccttacacaatatcagataattcattctagagacaaaccctacaaaaacaatgtggtaaagcttttacctagtcttgaacccttattatacactaaaagaattgatactgaagaaaaaccctacaataaggaatatggaaatgtcttttaaaagtcctcaaactttttgtttgaataaatgtaaaataattgatactggagagaacccctgcaattgtaaaaaaaaaaaaaaatgtggcaaagcttttaactggttctccatctttattaattaaaatattttatactggagagaaactctacatacataaaaaatgtgacagcatttaaccacacctgacatttttctaaaatagagaaatcatactggtgaaaaactctagaaatgtgttaaatgaggtaagtcctttaaatggtagttgcatgttatggtaggtaagataatttatactgaagaaaactcaggcaaatatgaaaaatgtggcaaaacttttaacaaattttcccatcttattgcacaggaagccttttatactagagaaaaattgtaaaaatataaagaatgtgaaaagccattaatgtctgttcacatcttactcaatatcagaaagtttatacttaacaaaagcattataggctagatgtggtggctcatgcctgtaatcccagcactttgggagctcatggcaggtggatcatgaggtcaggagttcaagaccagcctggctaacatggtgaatccccatctctactaaaaacacaaaaattagacaggcatggtggtgtgcacctgtaatcccagctactcaggaggctgaagcaggagaattgcttgaacccaggtggtggaggttgcagtgagtcaagatcaccccaccatactccagcctgggtgacagagcaagaatccatcttaaaaaaaaaaaaaaagcgtaaatgtgattactgtaaaaagacctttcagaaaacataggcctttaaagcaaagactatttattctaaagacaaacattaaaacataaagaggattgtgtagtacctttatttgtattacggattttattgtacacattttatatcaaaggaaaaccctgaaacagatgctcaaactttgttgaacatcggagaatttatattggagagaaagtgtaaatgaatgtcaaaaaatatttgttcaaaaactacagtttagaaaacactagtttatactaaaaaaatatttttgcagatgcagtaaatggggaaaatatgtttaatcaaaaattaagtctacataaacatttgaggattcacagtagaaagaatgaaggtgctgaaacttcagacattacactaaatcagagtgttgagtgtaaaaaagatataaatctaacaatataaatttaaagaagtagatttatttggagatttataattacattcgaggtatgcttctttctttgtaaaaaaaaatatagattttctgaaaagcaaatagtaatgtaactcacatttcaaattacttcatgttgatcctttcttcccattgtttctgtgaaagtattggaccaattgttgaatcagagatatgagattgttttttataggtgtccattattcatgaactttcctatggatgagtaaggacattaagttgtaagatgcataatgaaaatctaaatggagaggttctttgtggttgacttataacattgttttagtgatgtataaggcgagcgttcagagtaatattctaaattctagtgaggaaaacctttgaacgtcagtagtaaattattttatcaattgtacctttatgtaaacaaagttgtttttaatgagctaaaactattgtgctttgaaagaagtattaagctgccattgactctatcgtgtctcatcttaaggttctgcgtaaaagatggtgacaatatactatttgttaatgtaggggaatgacatcactagtagtctcttttttgccagtgtttttgtttgtttgttttgagactaagtcttactctgtcacccagactggggtgcagtggtgcgatctcagctcactgcaacctccacctcctgggtccaagtgattctcctgcttcagcctcacaagtagctggaactagaggcaggcaccaccactcctggctaatttttgtatttttagtagagatgaggtttccccatgttggccaggctggtctcaaactcctgacctcaggtgatacacccacctcggtgtaccgaagtgctgggattacaggcatgagccaccatgcctggcctactagaggttttacacagcaaacaagttgaagaattttgttcccataggacaaatttgtacttttttaccttatttaatttttttttaatttttgtgggtagtgtgcatacacacttatggcatatatgagatatgttaacacatgcacataatatttaatgatcacaacagagtaaatgaggcattcatcaccttgagcatgtatttatcctttgtattacaaacaatcccattatacagttttagttatttcaatatgtgcaattgaattactattaaccacagggtcattttatgatcataaaaattacatgagtataattaatacccatacatttctgagtcttgattaaatatttttaaaattttgttttataaattttttgcacatgtggcatctctgctgacaaacaaaaacagacttttagtttcaatttacatagagttacatatacaaatatattactctaaagatataccagccgagcacagtggctcccagcattttgggagcctgaggtgggaggatcatttgaggttaggagttcaagaccagcctggccaacatggtgaaaccccatctctactaaaaatacaaaaaattagctgggcatggtggtgcatgcccatggtcccagttactcaggaggctgaggcaggagaattgcttgaacctcggaggtggaggtagcagtgagctgagatggtgctactgcactccagcctgggtgaaagagcgagaaaccatctcaaaaaaaaaaataaataaataaaagatataccttaagcat

SEQ ID NO: 199 - DNA, 3669 bp, homo sapiens
gggtgcggcatccgggatctggcgcggcttttgcttgtagctccagccagagctcggttagggcctcatcgctctgctcccgctccttagggaagcctcggtgattctgccacagcctcagcctctgtggctctgtgacctgccggtattggatgattcgtatctaagactctgggacactcctgaagtcgggaaatggaactcttaacattcaaggatgtggccatagaattctctccagaagagtggaaatgtctggacacttcccagcagaatttatatagagatgtgatgttggagaactacagaaacctggtctccctgggtgttagtatctctaacccagacctggtcaccagtctggagcaaagaaaagagccctacaatttgaagatacatgaaacagcagccagacccccagctgtgtgttctcatttcacccaaaacctttggacagtgcagggcatagaagattcattccacaaacttataccaaaaggacatgagaaacgtggacatgagaatttaagaaaaacttgtaaaagtataaatgagtgtaaggtgcagaaaggtggttataatagaattaaccaatgcttattaactacccagaaaaaaacaattcaatctaatatatgtgtcaaagtttttcataaattttcaaattcaaacaaagataagataagatatactggagataaaacctttaaatgtaaagaatgtggcaaatcatttcacgtgctctcacgcctaactcaacacaaaagaattcatactggagagaacccctacacatgtgaagaatgtggcaaagcctttaattggtcctcaattcttactaaacataagagaattcatgccagagagaaattctacaagtgtgaagaatgtggtaaaggctttactcggtcctcacaccttactaaacataagagaattcatactggagagaaaccctacatatgtgaaaaatgtggtaaagcttttaaccaatcctcaacccttaatttacataagagaattcattctgcacaaaaatactacaaatgtgaagaatgtggtaaagcctttaagtggtcctcatcccttaatgaacataagagaattcatgctggagagaaacccttctcatgcgaagaatgtggcaatgtctttaccacatcctcagactttgctaaacataagagaattcatacaggagagaaaccctacaaatgtgaagaatgtggaaaatcctttaataggtccacaactcttacgacacataagagaatccatactggagagaaaccctacacatgtgaagaatgtggaaaagcctttaattggtcctcaacccttaatgtacacaagagaattcactctggaaaaaatccctacaaatgtgaagattgtggcaaagcctttaaagtgtttgcaaacctgcataatcataagaaaattcatactggagagaaaccctacatatgtaaacaatgtggcaaagcctttaaacagtcctcacacttgaataaacataagaaaattcacactgtagataaaccctacaaatgtaaagaatgcgggaaagcttttaagcagtactccaaccttcctcaacataagagaactcatactggaggaaaattttagaaatgtgaagaatgtgggagcctttaagtcttcctcagtcttttctaatcataattcatactggagagaaactctacacatgaaaaaattgacaaagcttttaaccgcaactcaatctgttctaaacataagagaaatggtattggtgagaagccataaaaatatgaaaaatgtggaaaagccttcaaatgcttgtcacatattactgaatataattcttactgcagaaaacccctaggaatattaaaagtgtggcaaaacctttaaccaatgctcatatctctttgcacatgatagcatttatacttgagaaaaattgtacaaatatagaaaatgtagaaaagccattaatgcctactcatgtgttactaaatatcagagagtttgtacttaataaaaggattataaatgtagtatttgttgaaagacctattagaaaatacaggtcttaaaagtgaagaagagtattctgaagatagacaatagaaatagtaagagggttgtagtacctgtacttgcatcatgggtcttattgtgcatatttcatactagaagaaaaccctgaagcagttgcccaaactttctttgacattagagaatttatattggaaagaaattttacaaatgtaataaatttggaaaagcatttgttcaaaaactatagcttaaaaaaaaccagtttatactagaagatattttgtagatgcggtaagtatgaaaagatagtctgaaattaagactaaatgtcagaatatttacagtagaaagaaaaaggcattaacacttgaaacattacagtatatcagagtgtaaagtataaaaaaattccaaagctgaaactgttagataatttctttctatataagttgaaaaggagtagctttttgaaattattccattgaaattatactttttttacctgaaaaaattatagattttttgaaaagcaaattcaactctaaaattacttcatactgattcaacttattgtttatatgaaagcatgtgatgaattgttgcatcagaggtatgagtgattctttttaggtgggcatcattcatgaactttttttttttttttgagacggagtctcgctctgtcgcccaggctggagtgcagtggcgggatctcggctcactgcaagctctgcctccccctgggttcacgccattctcctgcctcagcctcccaagtagctgggactacaggcgcccgccactacgcccggctaattttttgtatttttagtagagacggggtttcaccgttttagccgggatggtctcgatctcctgacctcgtgatccgcccgcctcggcctcccaaagtgctgggattacaggcgtattcatgaacttttacatgaatgagtaaggacattgaaagatgcatgagatgatgcatacatctttgtggttgacttatcattgcatgatgcatgacgtacatgttcagagtaatattcttctgcattatagtgagagaaaaatcttgaattttagtaataaattgcttttaccagttgcacatttatgtaataaaatacagtaaattttaaaattctcttttaagattgtgtgtgaaccttactcaagggtgtaggtaaaaaatggtaacagtatacttttagtaacatagtttaatgacatttctagtaatttctttttccagtggctttaaacagcaaataagttgaagaatattgttctcatgttaaatttttattattttttatatttaaatttatttttaaaaatttatgtgggtacatggtatgtgtatacattcatggcatagatgggttactttgatacagacatgcaacatgtaatcacatcagagtaaatgagttattcatcacctcaagcatttatcctttgtattacaaacaatccaattatacacttcatttttaaatgtacaattaaattattttttattacaggtaattttatgattgtatttagaattatatcagaatataattataatttagacatttctgtgtcctgaataaatatgtttttaaatgttcc

SEQ ID NO: 200 - DNA, 6696 bp, homo sapiens
atgaggccgcgctcgggcgggcgcccaggggccacgggccgccgccgccgccgcctgcgccgccgcccccgcggcctccggtgcagccgcctgccgccgccgccgccgctgccgctgctgctcgggctgctgctggcggccgcggggcccggcgcggcgcgggccaaggagacggcgttcgtggaggtggtgctgttcgagtcgagcccaagcggcgattacaccacctacaccaccggcctcacgggccgcttctcgcgggccggggccacgctcagcgccgagggcgagatcgtgcagatgcacccactgggcctatgtaataacaatgacgaagaggacttgtatgaatatggctgggtaggagtggtgaagctggaacagccagaattggacccgaaaccatgcctcactgtcctaggcaaggccaagcgagcagtacagcggggagctactgcagtcatctttgatgtgtctgaaaacccagaagctattgatcagctgaaccagggctctgaagacccgctcaagaggccggtggtgtatgtgaagggtgcagatgccattaagctgatgaacatcgtcaacaagcagaaagtggctcgagcaaggatccagcaccgccctcctcgacaacccactgaatactttgacatggggattttcctggctttcttcgtcgtggtctccttggtctgcctcatcctccttgtcaaaatcaagctgaagcagcgacgcagtcagaattccatgaacaggctggctgtgcaggctctagagaagatggaaaccagaaagttcaactccaagagcaaggggcgccgggaggggagctgtggggccctggacacactcagcagcagctccacgtccgactgtgccatctgtctggagaagtacattgatggagaggagctgcgggtcatcccctgtactcaccggtttcacaggaagtgcgtggacccctggctgctgcagcaccacacctgcccccactgtcggcacaacatcatagaacaaaagggaaacccaagcgcggtgtgtgtggagaccagcaacctctcacgtggtcggcagcagagggtgaccctgccggtgcattaccccggccgcgtgcacaggaccaacgccatcccagcctaccctacgaggacaagcatggactcccacggcaaccccgtcaccttgctgaccatggaccggcacggggagcagagcctctattccccgcagacccccgcctacatccgcagctacccacccctccacctggaccacagcctggccgctcaccgctgcggcctggagcaccgggcctactccccagcccaccccttccgcaggcccaagttgagtggccgcagcttctccaaggcagcttgcttctcccagtatgagaccatgtaccagcactactacttccagggcctcagctacccggagcaggaggggcagtccccacctagcctcgcaccccggggcccggcccgtgcctttcctccgagcggcagtggcagcctgctcttccccaccgtggtgcacgtggccccgccctcccacctggagagcggcagcacgtccagcttcagctgctatcacggccaccgctcggtgtgcagtggctacctggccgactgcccaggcagcgacagcagcagcagcagcagctccggccagtgccactgttcctccagtgactctgtggtagactgcactgaggtcagcaaccagggcgtgtacgggagctgctccaccttccgcagctccctcagcagcgactatgaccccttcatctaccgcagccggagcccctgtcgtgccagtgaggcggggggctcgggcagctcgggccggggacctgccctgtgcttcgagggctccccgcctcccgaggagctcccggcggtgcacagtcatggtgctgggcggggcgagccttggccgggccctgcctctccctcgggggatcaggtgtccacctgcagcctggagatgaactacagcagcaactcctccctggagcacagggggcccaatagctctacctcagaagtggggctcgaggcttctcctggggccgcccctgacctcaggaggacctggaaggggggccacgagttgccgtcgtgtgcctgctgctgcgagccccagccctccccagccgggcctagcgccggagcagctggcagcagcaccttgttcctggggccccacctctacgagggctctggcccggcgggtggggagccccagtcaggaagctcccagggcttgtacggccttcaccccgaccatttgcccaggacagatggggtgaaatacgagggtctgccctgctgcttctatgaagagaagcaggtggcccgcgggggcggagggggcagcggctgctacactgaggactactcggtgagtgtgcagtacacgctcaccgaggaaccaccgcccggctgctaccccggggcccgggacctgagccagcgcatccccatcattccagaggatgtggactgtgatctgggcctgccctcggactgccaagggacccacagcctcggctcctggggtgggacgcgaggcccggataccccacggccccacaggggcctgggagcaacccgggaagaggagcgggctctgtgctgccaggctagggccctactgcggcctggctgccctccggaggaggcgggtgctgtcagggccaacttccctagtgccctccaggacactcaggagtccagcaccactgccactgaggctgcaggaccgagatctcactcagcagacagcagcagcccgggagcctgagctcaggaggaactcttacctggaaattgggaactgtatggagactccaaactgacttctttcaaaaaacaaaaacaaaaaatttttttagctttgacaaacacacaaaagtggtaataaagagagccctccttgtcaacccaaaatgtgagccccctgtggcaaaaccaccccctaccccattaacaaatcaacagacaaaattctccgagtcctttgcctcttttgataacatgttgttctgttttgtaaagtgtgtgtgcttggggttccgaggtgtgggattgagttctctgctttgtttttttttaagatattgtatgtaaatgtaaaaagttatttaaatatatattttaaagaaccctaactgccaacttttgctgaaaaagaaaaaaaaatcactgctgcattaaatgaaccacatcatgtgtagatactgttgtctccctgaagggagctcaggcctttgaaaagctcagggcttcacctgccttagaaaatgaaccagaaacttgaagtaaagctagttgataggggtacaggctctgaggagcagtgcaaaactgcctctttctttctcgtggcaaatcccaatgtacacgatttcaggtctcagacgccatgcctctccagcccacgcctttaggcaggtgatggcagcagctaggaatagggtgtacatgatccacagccctgcggagccaggtcaagccgctgctatgaaagctccagggtgatggggacgattctgcccagtgtcctcagtctgtcccctcaggtcatggtcccaagtgaaatgacagagttcacagccctggtcttggctgaggtccaggtcatagtaagggcatgttcttggggccctcgacctgaactctgaccctccgggcagggaagaggaggttgtcccctttggttgtcctggctttggagtcctttgcaaaaatattttgggccccctgccactggctgcagaaatggctcgacggggtgtgtggggacagacacccagaaggaatgtacttttgtggccttggtgtccgatggggctgggggagagtgctctccactgacccagcagcacacccatgtgcagtgcgcctgcatctgtgtgggggcagccacaccccttggctgctgcttccttgggctgcctttctgggggcatgtgactggacctacgaggtctgcactgagctccatttgaatgatacctttcctatcccatttcccccacggaagcaccgcttcagggttattcagtcctctgcctcatggctgaaattgctcatctcgtctgcagatgtctactatcctgtctacctaatgcactattatgtattgattctccatgagacagagagagagagagactatcagatagtttacacccaaagggtaggtttttgtatatttttccagccttttttattaaggggaaggggagagtttaaaaacccaaaccgttgtggttttaaggtgtttcatttttaaaagggagagagaatctatttaaagctatttcagatcagggattgtcatccttttttgtccaatgtattccttgttctttaaaaaaattttttttagaggaaactaatattagtctttgtgttcactaactcttctggtcacttgtatttatttattcattcattcatcagatatttgttgccatctgaaagaactggcccagtgggtctgaaagctcgcttgagaataggaaacttgagacctggccccctgtgggtaggagaacaaggaccacctgggttctccagtcttgaacgagaatctcactcttatcagaatgtttttcttaacctcagcgtatgatgaggaaatttacttatctctagctaggatttgacaaattccaacatcaaatgatcaaaacatttgccactgaggcttcactggtgagatccgttctccgtcctcgggtgcagtcccttgggggctgctcctcggactgcgccccgcacacctgttatcgagggtgtgagaagcgcctaagctggtgacatgtgatctgggacgccttcatttctcgggccaggagtagcagctgctaaggacagcagcttgcattgcgtggttttagggaagcagggtctggcttttaatatgaactgcaaaaagcagcttctcactgatatttttttgttgttgtttctggggggtttttttgttttgtttttaatgcctttgagtgcatattttcttcctcgtctgaaaccgaactcccaaagtggctttctttagccctggctggaaaaccacctctcaatagccttaagcaataaatagatgagtagagaatgtggcttcaactgggcttattaaagtaagtgtgtctagttttcacttgaacaagtgatagctgcagatggcgaaagaaacccatttaatttttgtagcttacaggtggtagaaacaaaaatgcaattttaaaaccttaaataccaaataccaaccattgccttttttttttttgagatggaattttgctcttgtcacccaggctggagtgcaatggcgcgatctcacctcactgcaacctctgcctcccgggtccaagtgattctcctgcctcagcctcccaagtagctgggattacaggcatgcgccaccacacccagctaattttgtatttttggtagagacagggtatctccatgttggtcaggctggtcttggattcccgacctcaggtgatccgcccacctcggcctcccaaagtgctgggattacaggcgtgagccaccatgcctgcccagcaataccaaccattgtcttttaaattcgtgttggcttctcagacagggagatcactggaataaaataaccgatggtcttattttgtcacacgtaaatcaaaagaaatgtcctctttgaagttgtaagactccaccaatgacagacacccttttcggtggactctgagtggtgtgtagtggttttatagccatggaaactaggagtatctcactttccactgagaacccctgcccccaatccctctaagttggggtgtggcagttgggcagggtcaagtgacccagccctggctgtaggacagccatatacagtgaagagttctagaaccagctaaaaatggaagtttgggtgtttaccaacaaggtacctctttatggatgcagccccagtaagctggctttaactctcagctccttccctgtctcctcctaatccaagcccttttataaaataaagccccttctgtcccactgctcacatacttatgtgctgctagtctctactcgaagttcgtgcaggactaatgcttttaaaatgaggtctaaaaaataattactagtcgagactattattctttaaacagaactgcctttttctactctttatgtaaactctttctattgtgttggtctaacaaggcactattttaaaattttttaatttttcccatagcacttaaaagagattttgtaaagaccttgctgtaaagattttgtaataaaatggtctaagggctctttttccaacattaccatttttaaaaaatgttttaaaagctagaagacaacttatgtatattctgtatatgtatagcagcacatttcatttatggaaatatgttctcagaatatttatttactaatatatttatcttaagccatgtcttatgttgagagtgtgacattgttggaataatcattgaaaatgactaacacaagaccctgtaaatacatgataattgcacacagattttacatatttgcagaccaaaaatgatttaaaacaagttgtagtcttctatggttttgtaacaaattgtacacatgactgtaaaaaaaaaatacaattttatcaagtatgtgttaaaaaaaaaaaaaaaaaaaa

SEQ ID NO: 201 - DNA, 5607 bp, homo sapiens
attccttctgatagtgccatctttctctgccctaggaagaaacacctcttacagtcatctgcaggggattctccaaggacatgggaagatagatgtaagccctggaacccagactcctaagcgaagggaagctgcattctgctattaatgatggccaaatcagctctaagagagaatggcactaactctgagaccttccgacagcgtttcaggagattccattaccaggaggtggctgggccgcgggaggctttcagccaactctgggaactttgctgtcggtggctaaggccggaggtgcgcaccaaggagcagattgtagaactgttggtgctagagcagttcctgaccgtcttacctggggagatccagaattgggtacaggaacaatgtccagaaaatggagaggaggcagtgactctcgtggaagatttagaaagagagcctggaagacctagatcttcggtcacagtctctgtgaaggggcaggaagtgcgcttggagaagatgacacccccgaaatcatcacaagagttattaagtgttcggcaggagtcagtggaaccccagcccaggggtgtacccaagaaagagagggcaagaagcccagacctgggaccacaggagcagatgaacccaaaggagaagctcaaaccttttcaaaggagcggattgccatttcctaaatccggtgtggtctccaggttggagcaaggagagccatggatcccagatctgctgggctctaaggagaaagaacttccaagtggcagccacataggagacagacgagtgcatgctgatctgttaccatccaagaaagatagaagaagctgggtggaacaggatcactggagctttgaagatgagaaggtggcaggtgtgcactggggctatgaagagaccagaacgctcctcgcaattctcagccagactgagttttatgaggctctcagaaactgccataggaacagccaagtgtatggggctgtggctgagcggctcagggaatatggcttcctccggaccctggaacagtgtcggaccaagttcaaaggtctccagaagagctatcggaaagtcaagagcggccacccacctgagacctgccccttctttgaagagatggaagccctgatgagtgctcaggtcattgccctgcccagtaatggcctggaagcagcagcctctcactctggcctggtaggcagcgatgctgagactgaagagccagggcagaggggctggcagcatgaggagggagcagaagaggctgtggctcaggagtctgacagtgatgacatggatctagaggcgaccccccaggaccccaactcagctgcacctgttgtgttcagaagcccaggtggtgtacactggggctatgaagagaccaagacttaccttgcaattcttagtgagacccagttttatgaagccctccggaactgtcaccgcaacagccagctgtatggagcagtggctgagaggttatgggaatatggctttcttaggaccccagaacagtgtcggaccaagtttaaaagcctgcaaaccagctatcggaaagttaagaatggccaggcaccagagacctgtcccttctttgaagagatggatgctttggtgagtgtccgggttgctgccccacccaatgatggccaggaagagactgcttcttgccccgtccaggggaccagtgaggctgaagctcagaagcaagctgaggaagcagacgaggccacagaggaagattctgatgatgatgaagaggatactgagatacccccaggggctgtcataacccgtgctccagtgttattccaaagcccccgtggttttgaagctggatttgagaatgaagataattcaaaacgggatatttctgaggaagtacaactgcataggacattacttgcaagatctgaaaggaaaattccccggtatcttcatcagggtaaaggcaatgagagtgactgtagatcaggaagacagtgggcaaagacctcaggggagaaaagaggaaaactgacactcccggagaagagcttaagtgaagtcctaagtcaacagagaccttgcttgggagagagaccctataaatatctcaaatacagcaaaagctttggtccaaactcccttctcatgcatcaggtatcccaccaggtggaaaatccatataaatgtgctgattgtgggaaaagcttcagtcggagtgcacgactcattagacaccggagaatccacactggagagaaaccttataaatgtcttgactgtggaaaaagtttccgtgacagttcaaatttcatcacccataggagaatccacacaggagagaaaccttatcaatgtggtgagtgtgggaaatgcttcaatcagagctcaagccttatcattcaccagagaacccacacaggagaaaagccctatcaatgtgaagagtgtggaaaaagcttcaataacagttctcattttagtgcacatcggaggatacacacaggagagagaccccatgtgtgtcctgactgtggaaagagtttcagtaagagttctgacttacgtgcacatcatagaacccacacaggagagaaaccctatgggtgtcatgactgtggtaagtgcttcagtaaaagctctgcccttaataagcacggagaaatccatgcacgggaaaagcttctgacacagtcagctcccaagtaagcccctgaggatatataacggaaagaggctcaataaatgtattgtttagaaagtcttccaatagtgagattcatctactattctgtgtccagttagcttaggaaattcactttaggatttatgccactgtttgttccttgtttttcctgatctagactcaaatccccaaggcagtctaaagaatgaaaggaagatttcagtccctctctttgcctgcatctgaattgatggataacatcttttccctctcagtgcctatggtgttcccttaatataagcacagaggacaaggtaatagatcctatgaatttgataagcatccttctttactcattctgtcattcagctgcattttgacaggaaaaacccattacatttcgagaagaagttatgagactttgcccattaggtgggtctagctcttttttttttttttggagacggagttttgctcttgttgcccaggctggagtgcaatggcacgatctcagctcactgcaacctctgcttcccgggttcaagtgattctcctgcctcagcctcccaagtggctggaattacaagcatgcgccaccatgcccagctaattttatatttttagtagagatggggtttctccatgttgggcaggctggtctcaaactcccgacctcaggtgatctgcctgcctcggcctcccaaagtgctgggattacaggcatgagccactgcgccgggcttttttttttcgagatggagtctcactctgtcgtccaggctggagtgcagtggcatgatctcagctcactgcaacctctgccttctgggttcaaacaattttcctgcctcagcctcctgagtagctgggattacagccacctgccaccataccaggctaaattttgcatttttagtagagatggggtttcaccatgttggccaggctggttttgaattgacctcatgatctgcctgcctaggtctcccaaagtgctgggattacaggtgtgagccactgcacccggcccagctcttctttatacaataatggaaatgctaaaatgaatgactcttcctgctcacttaaacctgtgctcaaaatgacatatttgtcaggcaccctcttcatttaccttaaagaaggagagtttaatgtccatcttggttctgccctatgaatcatcttgtcaagaacaggtgttcttatgcagaaacaatgaaaaccttatactgaagtgtgaaccctggatttcttagtttcttctgagtcctagaagaagggttggaatagaataatacatttacaggatttaggttggttttctttctgtccagtctcatctgaatttcgtctgtctcttgtggtccagaagttccacagagcaacgcagctgcatgtggtgacaggtagagcagttaaagctgccaataggaactcgtccatattccacacacctggtatagtgttatgccctccatgggcacttacctgcaataagcagaagccactgccacattcccgtgtattgggaaaatggactactgtgtgcgaacaggccctttaccctaatggcagggaagatggattatctttggccagtggagctgccaatctagacatacacattcaactgaatacaattaaaagcagttctttaaatgcaaatataattactcatctttataatacaatagtattaactgcccatatgctcatagtatgatgagccctgtatagcacaaggtcaacaggtcctctccttgtccttacaatctaaagcagatgacactgacatggacaaacaagtgcacatgcatagttgcggcagttttagagaaatctagaaagctaggtagcaacactatgcataaatgttgtggtccaatgcattagtttgctttaacaaaaatctgggaggtattttttctctttattcaggaaggcttcatgaagcaggaagtggtcaaaggagggaaggttactggttaaattatgataggaagaactttccataactagttgcaaaattgagtgctgggtgggttgaggaatgggaaaaagggggagcaaggtgttttgtgtagatggaacaaagggcaaaggatagactgtaaggaaggccagataaagcttggagtagcatgagaacttgaggaatagtatgatatgggctgtgcagcaggcagagagaatcaccttagctgaaacatgggtgttaggagcagaccatgaggtggtagaaccatcatctatagtaaatcaggtactacgctataactattgataaggaaacagctgactgccactgaaagaataagcagttttaggggactagctcctatgggagataaaggtcagaaatcgtagtatctgatgaagatattttgatgagcaggtgagaagaaagataaacatggccagatggccaaggactgggataagtagccgtttcacattcaattagaattctgtggctggaataagatcagggagagcagtaggaagatatagtattctataattcatagcttgttgtgttagagattaattaggattctgctgttgaatcttagtacaaaaaaatctaatatttattaggaattaagggaagatggtacttctgttatgttgcctaagcagacaggaagctacaagaaacaccagtctgaagcagtgcctcaggatctcagatgatttaggaagtgtgctgtaatgtcaaaaaaaaaaaaaagtattgtctttagtatatctatgtatagtctcgtgggaaaagcattggttgtggtatcaacagatattctggttccagatgtcttgtaagttaacctgcctccatttccctttctgtaaagcaaaataatgtttacacctaatctgtctctcagggataccatattaataaaaatcatgtctataaagtg

SEQ ID NO: 202 - protein, 626 aa, homo sapiens
MADQRMDISSTISDFMSPGPTDLLSSSLGTSGVDCNRKRKGSSTDYQESMDTDKDDPHGRLEYTEHQGRIKNAREAHSQIEKRRRDKMNSFIDELASLVPTCNAMSRKLDKLTVLRMAVQHMKTLRGATNPYTEANYKPTFLSDDELKHLILRAADGFLFVVGCDRGKILFVSESVFKILNYSQNDLIGQSLFDYLHPKDIAKVKEQLSSSDTAPRERLIDAKTGLPVKTDITPGPSRLCSGARRSFFCRMKCNRPSVKVEDKDFPSTCSKKKADRKSFCTIHSTGYLKSWPPTKMGLDEDNEPDNEGCNLSCLVAIGRLHSHVVPQPVNGEIRVKSMEYVSRHAIDGKFVFVDQRATAILAYLPQELLGTSCYEYFHQDDIGHLAECHRQVLQTREKITTNCYKFKIKDGSFITLRSRWFSFMNPWTKEVEYIVSTNTVVLANVLEGGDPTFPQLTASPHSMDSMLPSGEGGPKRTHPTVPGIPGGTRAGAGKIGRMIAEEIMEIHRIRGSSPSSCGSSPLNITSTPPPDASSPGGKKILNGGTPDIPSSGLLSGQAQENPGYPYSDSSSILGENPHIGIDMIDNDQGSSSPSNDEAAMAVIMSLLEADAGLGGPVDFSDLPWPL

SEQ ID NO: 203 - protein, 333 aa, homo sapiens
MLFLQFLLLALLLPGGDNADASQEHVSFHVIQIFSFVNQSWARGQGSGWLDELQTHGWDSESGTIIFLHNWSKGNFSNEELSDLELLFRFYLFGLTREIQDHASQDYSKYPFEVQVKAGCELHSGKSPEGFFQVAFNGLDLLSFQNTTWVPSPGCGSLAQSVCHLLNHQYEGVTETVYNLIRSTCPRFLLGLLDAGKMYVHRQVRPEAWLSSRPSLGSGQLLLVCHASGFYPKPVWVTWMRNEQEQLGTKHGDILPNADGTWYLQVILEVASEEPAGLSCRVRHSSLGGQDIILYWGHHFSMNWIALVVIVPLVILIVLVLWFKKHCSYQDIL

SEQ ID NO: 204 - protein, 270 aa, homo sapiens
MQYPHPGPAAGAVGVPLYAPTPLLQPAHPTPFYIEDILGRGPAAPTPAPTLPSPNSSFTSLVSPYRTPVYEPTPIHPAFSHHSAAALAAAYGPGGFGGPLYPFPRTVNDYTHALLRHDPLGKPLLWSPFLQRPLHKRKGGQVRFSNDQTIELEKKFETQKYLSPPERKRLAKMLQLSERQVKTWFQNRRAKWRRLKQENPQSNKKEELESLDSSCDQRQDLPSEQNKGASLDSSQCSPSPASQEDLESEISEDSDQEVDIEGDKSYFNAG

SEQ ID NO: 205 - protein, 195 aa, homo sapiens
MTDSVIYSMLELPTATQAQNDYGPQQKSSSSRPSCSCLVAIALGLLTAVLLSVLLYQWILCQGSNYSTCASCPSCPDRWMKYGNHCYYFSVEEKDWNSSLEFCLARDSHLLVITDNQEMSLLQVFLSEAFCWIGLRNNSGWRWEDGSPLNFSRISSNSFVQTCGAINKNGLQASSCEVPLHWVCKKCPFADQALF

SEQ ID NO: 206 - protein, 607 aa, homo sapiens
MILLTFSTGRRLDFVHHSGVFFLQTLLWILCATVCGTEQYFNVEVWLQKYGYLPPTDPRMSVLRSAETMQSALAAMQQFYGINMTGKVDRNTIDWMKKPRCGVPDQTRGSSKFHIRRKRYALTGQKWQHKHITYSIKNVTPKVGDPETRKAIRRAFDVWQNVTPLTFEEVPYSELENGKRDVDITIIFASGFHGDSSPFDGEGGFLAHAYFPGPGIGGDTHFDSDEPWTLGNPNHDGNDLFLVAVHELGHALGLEHSNDPTAIMAPFYQYMETDNFKLPNDDLQGIQKIYGPPDKIPPPTRPLPTVPPHRSIPPADPRKNDRPKPPRPPTGRPSYPGAKPNICDGNFNTLAILRREMFVFKDQWFWRVRNNRVMDGYPMQITYFWRGLPPSIDAVYENSDGNFVFFKGNKYWVFKDTTLQPGYPHDLITLGSGIPPHGIDSAIWWEDVGKTYFFKGDRYWRYSEEMKTMDPGYPKPITVWKGIPESPQGAFVHKENGFTYFYKGKEYWKFNNQILKVEPGYPRSILKDFMGCDGPTDRVKEGHSPPDDVDIVIKLDNTASTVKAIAIVIPCILALCLLVLVYTVFQFKRKGTPRHILYCKRSMQEWV

SEQ ID NO: 207 - protein, 821 aa, homo sapiens
MVSWGRFICLVVVTMATLSLARPSFSLVEDTTLEPEEPPTKYQISQPEVYVAAPGESLEVRCLLKDAAVISWTKDGVHLGPNNRTVLIGEYLQIKGATPRDSGLYACTASRTVDSETWYFMVNVTDAISSGDDEDDTDGAEDFVSENSNNKRAPYWTNTEKMEKRLHAVPAANTVKFRCPAGGNPMPTMRWLKNGKEFKQEHRIGGYKVRNQHWSLIMESVVPSDKGNYTCVVENEYGSINHTYHLDVVERSPHRPILQAGLPANASTVVGGDVEFVCKVYSDAQPHIQWIKHVEKNGSKYGPDGLPYLKVLKAAGVNTTDKEIEVLYIRNVTFEDAGEYTCLAGNSIGISFHSAWLTVLPAPGREKEITASPDYLEIAIYCIGVFLIACMVVTVILCRMKNTTKKPDFSSQPAVHKLTKRIPLRRQVTVSAESSSSMNSNTPLVRITTRLSSTADTPMLAGVSEYELPEDPKWEFPRDKLTLGKPLGEGCFGQVVMAEAVGIDKDKPKEAVTVAVKMLKDDATEKDLSDLVSEMEMMKMIGKHKNIINLLGACTQDGPLYVIVEYASKGNLREYLRARRPPGMEYSYDINRVPEEQMTFKDLVSCTYQLARGMEYLASQKCIHRDLAARNVLVTENNVMKIADFGLARDINNIDYYKKTTNGRLPVKWMAPEALFDRVYTHQSDVWSFGVLMWEIFTLGGSPYPGIPVEELFKLLKEGHRMDKPANCTNELYMMMRDCWHAVPSQRPTFKQLVEDLDRILTLTTNEEYLDLSQPLEQYSPSYPDTRSSCSSGDDSVFSPDPMPYEPCLPQYPHINGSVKT

SEQ ID NO: 208 - protein, 480 aa, homo sapiens
MEVAPEQPRWMAHPAVLNAQHPDSHHPGLAHNYMEPAQLLPPDEVDVFFNHLDSQGNPYYANPAHARARVSYSPAHARLTGGQMCRPHLLHSPGLPWLDGGKAALSAAAAHHHNPWTVSPFSKTPLHPSAAGGPGGPLSVYPGAGGGSGGGSGSSVASLTPTAAHSGSHLFGFPPTPPKEVSPDPSTTGAASPASSSAGGSAARGEDKDGVKYQVSLTESMKMESGSPLRPGLATMGTQPATHHPIPTYPSYVPAAAHDYSSGLFHPGGFLGGPASSFTPKQRSKARSCSEGRECVNCGATATPLWRRDGTGHYLCNACGLYHKMNGQNRPLIKPKRRLSAARRAGTCCANCQTTTTTLWRRNANGDPVCNACGLYYKLHNVNRPLTMKKEGIQTRNRKMSNKSKKSKKGAECFEELSKCMQEKSSPFSAAALAGHMAPVGHLPPFSHSGHILPTPTPIHPSSSLSFGHPHPSSMVTAMG

SEQ ID NO: 209 - protein, 265 aa, homo sapiens
MGSPSACPYRVCIPWQGLLLTASLLTFWNLPNSAQTNIDVVPFNVAEGKEVLLVVHNESQNLYGYNWYKGERVHANYRIIGYVKNISQENAPGPAHNGRETIYPNGTLLIQNVTHNDAGFYTLHVIKENLVNEEVTRQFYVFSEPPKPSITSNNFNPVENKDIVVLTCQPETQNTTYLWWVNNQSLLVSPRLLLSTDNRTLVLLSATKNDIGPYECEIQNPVGASRSDPVTLNVRYESVQASSPDLSAGTAVSIMIGVLAGMALI

SEQ ID NO: 210 - protein, 298 aa, homo sapiens
MKTLQSTLLLLLLVPLIKPAPPTQQDSRIIYDYGTDNFEESIFSQDYEDKYLDGKNIKEKETVIIPNEKSLQLQKDEAITPLPPKKENDEMPTCLLCVCLSGSVYCEEVDIDAVPPLPKESAYLYARFNKIKKLTAKDFADIPNLRRLDFTGNLIEDIEDGTFSKLSLLEELSLAENQLLKLPVLPPKLTLFNAKYNKIKSRGIKANAFKKLNNLTFLYLDHNALESVPLNLPESLRVIHLQFNNIASITDDTFCKANDTSYIRDRIEEIRLEGNPIVLGKHPNSFICLKRLPIGSYF

SEQ ID NO: 211 - protein, 359 aa, homo sapiens [sequence omitted]

SEQ ID NO: 212 - protein, 453 aa, homo sapiens
MGRTREAGCVAAGVVIGAGACYCVYRLAWGRDENEKIWDEDEESTDTSEIGVETVKGAKTNAGAGSGAKLQGDSEVKPEVSLGLEDCPGVKEKAHSGSHSGGGLEAKAKALFNTLKEQASAKAGKGARVGTISGNRTLAPSLPCPGGRGGGCHPTRSGSRAGGRASGKSKGKARSKSTRAPATTWPVRRGKFNFPYKIDDILSAPDLQKVLNILERTNDPFIQEVALVTLGNNAAYSFNQNAIRELGGVPIIAKLIKTKDPIIREKTYNALNNLSVNAENQGKIKTYISQVCDDTMVCRLDSAVQMAGLRLLTNMTVTNHYQHLLSYSFPDFFALLFLGNHFTKIQIMKLIINFTENPAMTRELVSCKVPSELISLFNKEWDREILLNILTLFENINDNIKNEGLASSRKEFSRSSLFFLFKESGVCVKKIKALANHNDLVVKVKVLKVLTKL

SEQ ID NO: 213 - protein, 122 aa, homo sapiens
MVPGPPESVVRFFLWFCFLLPPTRKASCDPRDLKSCNRPCVWSRLLKPNSSLSNLETAYFPQILRFLRPWYFSRSHLNYHQKAPARWEWLYSIYRKGTKAQRRNVLRSPCAPPQPSWPCSVI

SEQ ID NO: 214 - protein, 641 aa, homo sapiens
MDGLQASAGPLRRGRPKRRRKPQPHSGSVLALPLRSRKIRKQLRSVVSRMAALRTQTLPSENSEESRVESTADDLGDALPGGAAVAAVPDAARREPYGHLGPAELLEASPAARSLQTPSARLVPASAPPARLVEVPAAPVRVVETSALLCTAQHLAAVQSSGAPATASGPQVDNTGGEPAWDSPLRRVLAELNRIPSSRRRAARLFEWLIAPMPPDHFYRRLWEREAVLVRRQDHTYYQGLFSTADLDSMLRNEEVQFGQHLDAARYINGRRETLNPPGRALPAAAWSLYQAGCSLRLLCPQAFSTTVWQFLAVLQEQFGSMAGSNVYLTPPNSQGFAPHYDDIEAFVLQLEGRKLWRVYRPRVPTEELALTSSPNFSQDDLGEPVLQTVLEPGDLLYFPRGFIHQAECQDGVHSLHLTLSTYQRNTWGDFLEAILPLAVQAAMEENVEFRRGLPRDFMDYMGAQHSDSKDPRRTAFMEKVRVLVARLGHFAPVDAVADQRAKDFIHDSLPPVLTDRERALSVYGLPIRWEAGEPVNVGAQLTTETEVHMLQDGIARLVGEGGHLFLYYTVENSRVYHLEEPKCLEIYPQQADAMELLLGSYPEFVRVGDLPCDSVEDQLSLATTLYDKGLLLTKMPLALN

SEQ ID NO: 215 - protein, 867 aa, homo sapiens
MTENKTVSSSSTRDDQTNIGLTCQEVKALREKAWSRTNEGNAMSQSLVLYGASKENSEGFHESKMTNTEGVNKGIYFSYPCRRHSCAVVNIPAPCVNKMISHIQDVESKIQEHLKRFETSFEEWSRTSSTKDLKEDWSVTTPVKEVKPGEKRDEKCPELKQEMETLLSEAIRLIKSLETDRADAEEALKQQRSRKNMINMKIDSWSVWKLQELPLAVQKEHEAYLSDVIELQWHLEDKANQLQHFEKQKTELEEANAKIQADIDYMNEHGPLLDSKQNQELQDLKNHYKKKMEVMDLHRKVNEELEEALEACENARLKAQQIKEEIDKDIYQDEKTIEAYKREIYQLNSLFDHYSSSVINVNTNIEEKEEEVTEAIRETKSSKNELHSLSKMLEDLRRVYDQLTWKQKSHENQYLEAVNDFYAAKKTWDIELSDVAKDFSAISLACTKLTEDNKKLEIDINKITVKTNESIRKKSKYESEIKYLTIMKLKNDKHLKNIYKEAYRIGTLFHLTKHKTDEMEDKIAEVRRKFKGREEFLKKLTQGEVAAGMVLQKKLYSIYEVQALERKELIKNRAICAMSLAELQEPLLQLEDEAERIRSLDKEHSVMLNNIIDQKDLIRRKVGKVKKKLRKKGKKTLDALIETESKRSAIFKDLEATKSKTMIFYAKINELNEELKAKEEEKKSFDQTLEILKNKFITMRFKREHAQTVFDHYMQEKKDCEERIFEEDQRFRVLLAVRQKTLQDTQKIIADSLEENLRLAQEYQQLQITFLKEKDNYFNIYDKQLSLDTSIRDKKQLCQLQRRMHTLWQEHFKLVVLFSQMRLANFQTDSQESIQKILAVQEESSNLMQHILGFFQTLTDGTCENDG

SEQ ID NO: 216 - protein, 101 aa, homo sapiens
MDQYVSTAPPRFPIAQLGTFKQDSAGMGRIFKGNLLQKKALTTFENEHHIRFFTLLVLFHVMVLLRNHSRIQGVSEDWKRANSIFRNFLRLKSSRNTAEAE

SEQ ID NO: 217 - protein, 333 aa, homo sapiens
MRIWWLLLAIEICTGNINSQDTCRQGHPGIPGNPGHNGLPGRDGRDGAKGDKGDAGEPGRPGSPGKDGTSGEKGERGADGKVEAKGIKGDQGSRGSPGKHGPKGLAGPMGEKGLRGETGPQGQKGNKGDVGPTGPEGPRGNIGPLGPTGLPGPMGPIGKPGPKGEAGPTGPQGEPGVRGIRGWKGDRGEKGKIGETLVLPKSAFTVGLTVLSKFPSSDMPIKFDKILYNEFNHYDTAAGKFTCHIAGVYYFTYHITVFSRNVQVSLVKNGVKILHTKDAYMSSEDQASGGIVLQLKLGDEVWLQVTGGERFNGLFADEDDDTTFTGFLLFSSP

SEQ ID NO: 218 - protein, 126 aa, homo sapiens
MAPGEVTITVRLIRSFEHRNFKPVVYHGVNLDQTVKEFIVFLKQDIPLRTNLPPPFRNYKYDALKIIHQAHKSKTNELVLSLEDDERLLLKEDSTLKAAGIASETEIAFFCEEDYKNYKANPISSW

SEQ ID NO: 219 - protein, 622 aa, homo sapiens
MPPTQAESVIRSIIREIGQECAAHGEIVSETLIAFMVKAVVLDPSNGFNMDRTLMKSDVQNLVKLCMTRLLDTKNPSLDTIKMQVYFDMNYTNRVEFLEEHHRVLESRLGSVTREITDNRACAKEELESLYRKIISYVLLRSGLGSPTDIKTVREVTAALQSVFPQAELGTFLTLSKKDKERQLKELTMIVTGIRLFNRDCGKGGEGIDDLPAVLHVAIPATMQHIDYQLETARSQVYRYTAILEKAANDPLMRAELQPYMLKEALYNIRQYEVFLQIILSDIITGAQEVEMMTKQLGAHLEQLKMTIKSKIAVPTSQVFPIFIALSTLWTSLQDETIVVGVLSNLFTHIQPFLGAHELYFPERVMQCHLNGATVKTDVCRMKEHMEDRVNVADFRKLEWLFPETTANFDKLLIQYRGFCAYTFAATDGLLLPGNPAIGILKYKEKYYTFNSKDAAYSFAENPEHYIDIVREKAKKNTELIQLLELHQQFETFIPYSQMRDADKHYIKPITKCESSTQTNTHILPPTIVRSYEWNEWELRRKAIKLANLRQKVTHSVQTDLSHLRRENCSQVYPPKDTSTQSMREDSTGVPRPQIYLAGLRGGKSEITDEVKVNLTRDVDET

SEQ ID NO: 220 - protein, 244 aa, homo sapiens
MGDLFSLFWEVDPPPIPVNCAIPNQDYECWKDDSCGTIGSFLLWYFVIVFVLMFFSRASVWMSEDKKDEGSGTSTSVRKASKETSCKRQSKDSAWDPSQTMKKPKQNQLTPVTNSEVALVNAYPEQRRARRQSQFNEVNQNQHDSDTTEYGSEESNSEASSWKESESEHHPSPDSIKRRKMAQRQRNLGSYQMSERHCLHCKALRTNEWLAHHSRQKPSVTPPMKRDSQEESSISDINKKFSKF

SEQ ID NO: 221 - protein, 253 aa, homo sapiens
MSFSVHNQKGSKRPLPLEPLLFLQVPRSNYLHFQEEKQRLHLKKFLLDRMFLVAKIQANVERKDVADYYEQMFQSVLKHHLGEAVTGLLLIYPTSILHILESSSDTLYKVLLDYIGHVKDETVFFIQQMKIIVISHNIPMRLFMQWHVSVIKVPVMYLDDVTQSQSLKEVITDFLTQTHKLSLYLCQTMKVGTKGPGDNLHQVAPDLLLPEQIIKYLCKSEEFMDPATFINMYNRPIHITLDSEVVWPAPSRF

SEQ ID NO: 222 - protein, 1079 aa, homo sapiens
MEWLLEDLLGAKGDMGLLWGQLTHALACRHCGSSCFQSPGNLVTLFLFVVWQIQRWWQLGRLRQLHPWCSGNMVQGKELPLLHRVAFLDHLCKQKSEVEEEGEEEEEGEDEASLDPLKPCSPTKEAPTGEQATPAPPQPSCGSEGLLKAIGIPEQTVMQPVSPSRSFPIFQILTSFPVRHKIASGNRQQQRKSQLFWGLPSLHSESLEAIFLSSGGPSPLKWSVCSSVFFNKLAFLPRSNLLLPQYHSSAQFSTHGAHTMEDLEGMAPDPQLLPPPSSPSVSSLLLHLRPFPVDHKGVLSGAEAPTQSPGTSPLEVLPGYETHLETTGHKKMPQAFEPPMPPPCQSPASLSEPRKVSPEGGLAISKDFWGTVGYREKPQASESSMPVPCPPLDSLPELQRESSLEDPSRYKPQWECRENSGNLWAFESPVLDLNPELSGTSPECVPPASETPWKGMQSRENIWVPADPVSPPSLPSVPLLESLVMGPQGVLSESKALWETMGQKENLWASDSPDPVHSTPPTTLMEPHRINPGECLATSEATWKDTEHSRNSSASRSPSLALSPPPALAPELLRVRSMGVLSDSEARCGDIQKTKNSWASKHPACNLPQDLHGASPLGVLSDSQSIVGEMEQKENCVPVFPGRGSSPSSNSVSKSHVSEPIADQSNYKPDGEAVEQRKNHWATELPAPSSLSTPLPEPHIDLELVWRNVQQREVPQGPSPLAVDPLHPVPQPPTLAEAVKIERTHPGLPKGVTCPGVKAEAPLSQRWTVPELLTHPGIHAWQWSRELKLRLKKLRQSPASRAPGPSQSFCSSPILSSTIPDFWGLPSCPPQQIYPPNPCPHSSSCHPQEVQRTVPQPVQSSHCHHFQSSSQLQPQESGRAEQGSQRGEKMKGKMVSQVPSQGPCVHMEAGVDYLSPGPGEPSNSKVLVSGKRKDKASASSSAKKREHPRKPKAGDHRRGTARLGLSTVTGKNHPAQARSLVEAPVSTFPQRSQHRGQSSQHTALPQLLLPKASGPQDQPEAGRRASDILTPRHCKHCPWAHMEKYLSFPTLKASLTRGLQKVLAKCLDNHRPLPTKSSQ

SEQ ID NO: 223 - protein, 179 aa, homo sapiens
MSSQKGNVARSRPQKHQNTFSFKNDKFDKSVQTKKINAKLHDGVCQRCKEVLEWRVKYSKYKPLSKPKKCVKCLQKTVKDSYHIMCRPCACELEVCAKCGKKEDIVIPWSLPLLPRLECSGRILAHHNLRLPCSSDSPASASRVAGTTGAHHHAQLIFVFLVEMGFHYVGQAGLELLTS

SEQ ID NO: 224 - protein, 328 aa, homo sapiens
MEIVWEVLFLLQANFIVCISAQQNSPKIHEGWWAYKEVVQGSFVPVPSFWGLVNSAWNLCSVGKRQSPVNIETSHMIFDPFLTPLRINTGGRKVSGTMYNTGRHVSLRLDKEHLVNISGGPMTYSHRLEEIRLHFGSEDSQGSEHLLNGQAFSGEVQLIHYNHELYTNVTEAAKSPNGLVVVSIFIKVSDSSNPFLNRMLNRDTITRITYKNDAYLLQGLNIEELYPETSSFITYDGSMTIPPCYETASWIIMNKPVYITRMQMHSLRLLSQNQPSQIFLSMSDNFRPVQPLNNRCIRTNINFSLQGKDCPNNRAQKLQYRVNEWLLK

SEQ ID NO: 225 - protein, 248 aa, homo sapiens
MFLAKALLEGADRGLGEALGGLFGGGGQRREGGGRNIGGIVGGIVNFISEAAAAQYTPEPPPTQQHFTSVEASESEEVRRFRQQFTQLAGPDMEVGATDLMNILNKVLSKHKDLKTDGFSLDTCRSIVSVMDSDTTGKLGFEEFKYLWNNIKKWQCVYKQYDRDHSGSLGSSQLRGALQAAGFQLNEQLYQMIVRRYANEDGDMDFNNFISCLVRLDAMFRAFKSLDRDRDGLIQVSIKEWLQLTMYS

SEQ ID NO: 226 - protein, 278 aa, homo sapiens
MTDLNKHIKQAQTQRKQLLEESRELHREKLLVQAENRFFLEYLTNKTEEYTEQPEKVWNSYLQKSGEIERRRQESASRYAEQISVLKTALLQKENIQSSLKRKLQAMRDIAILKEKQEKEIQTLQEETKKVQAETASKTREVQAQLLQEKRLLEKQLSEPDRRLLGKRKRRELNMKAQALKLAAKRFIFEYSCGINRENQQFKKELLQLIEQAQKLTATQSHLENRKQQLQQEQWYLESLIQARQRLQGSHNQCLNRQDVPKTTPSLPQGTKSRINPK

SEQ ID NO: 227 - protein, 1450 aa, homo sapiens
MSSQGSPSVALSTTTVSSVAVQAGDSKIVIAVIKCGKWVQLQLAESQPNLLEIGSSQDETKKLLHDHELLLAKLKALEDRVWELLQEADKTAEENKDQSQVYDAMAETLGEAWAALVSMLERRTELLRLTSEFFENALEFAIKIDQAEDFLQNTHEFESAESLKSLLQLHEHHTKELLERSLALLNKSQQLTDFIEKFKCEGPNVNPELTQGAHSSCLKVDRLLELLQDRRRQLDKYLKQQWQELSQVLQICQWDQQENQVTCWFQKTIRNLQEQSLGSSLSDNEDRIHKQEELIIKAKEWNSAVEKLKSEALRILLSKDYVEKEHLQLSHQKLSQLQEEFGQLMVERNTWLKKANEFFNSANKAFDVLGRVEAYLKLLKSEGLSLAVLAVRHEELHRKIKDCTTDALQKGQTLISQVDSCSSQVSGIHEMMGCIKRRVDHLTEQCSAHKEYALKKQQLTASVEGYLRKVEMSIQKISPVLSNAMDVGSTRSESEKILNKYLELDIQAKETSHELEAAAKTMMEKNEFVSDEMVSLSSKARWLAEELNLFGQSIDYRSQVLQTYVAFLKSSEEVEMQFQSLKEFYETEIPQKEQDDAKAKHCSDSAEKQWQLFLKKSFITQDLGLEFLNLINMAKENEILDVKNEVYLMKNTMENQKAEREELSLLRLAWQLKATESKPGKQQWAAFKEQLKKTSHNLKLLQEALMPVSALDLGGSLQFILDLRQKWNDMKPQFQQLNDEVQYIMKESEELTGRGAPVKEKSQQLKDLIHFHQKQKERIQDYEDILYKVVQFHQVKEELGRLIKSRELEFVEQPKELGDAHDVQIHLRCSQEKQARVDHLHRLALSLGVDIISSVQRPHCSNVSAKNLQQQLELLEEDSMKWRAKAEEYGRTLSRSVEYCAMRDEINELKDSFKDIKKKFNNLKFNYTKKNEKSRNLKALKYQIQQVDMYAEKMQALKRKMEKVSNKTSDSFLNYPSDKVNVLLEVMKDLQKHVDDFDKVVTDYKKNLDLTEHFQEVIEECHFWYEDASATVVRVGKYSTECKTKEAVKILHQQFNKFIAPSVPQQEERIQEATDLAQHLYGLEEGQKYIEKIVTKHKEVLESVTELCESLTELEEKLKQGDVLKMNPNLEDFHYDYIDLLKEPAKNKQTIFNEERNKGQVQVADLLGINGTGEERLPQDLKVSTDKEGGVQDLLLPEDMLSGEEYECVSPDDISLPPLPGSPESPLAPSDMEVEEPVSSSLSLHISSYGVQAGTSSPGDAQESVLPPPVAFADACNDKRETFSSHFERPYLQFKAEPPLTSRGFVEKSTALHRISAEHPESMMSEVHERALQQHPQAQGGLLETREKMHADNNFTKTQDRLHASSDAFSGLRFQSGTSRGYQRQMVPREEIKSTSAKSSVVSLADQAPNFSRLLSNVTVMEGSPVTLEVEVTGFPEPTLTWWVAYNDKP

SEQ ID NO: 228 - protein, 788 aa, homo sapiens
MTIHQFLLLFLFWVCLPHFCSPEIMFRRTPVPQQRILSSRVPRSDGKILHRQKRGWMWNQFFLLEEYTGSDYQYVGKLHSDQDKGDGSLKYILSGDGAGTLFIIDEKTGDIHATRRIDREEKAFYTLRAQAINRRTLRPVEPESEFVIKIHDINDNEPTFPEEIYTASVPEMSVVGTSVVQVTATDADDPSYGNSARVIYSILQGQPYFSVEPETGIIRTALPNMNRENREQYQVVIQAKDMGGQMGGLSGTTTVNITLTDVNDNPPRFPQNTIHLRVLESSPVGTAIGSVKATDADTGKNAEVEYRIIDGDGTDMFDIVTEKDTQEGIITVKKPLDYESRRLYTLKVEAENTHVDPRFYYLGPFKDTTIVKISIEDVDEPPVFSRSSYLFEVHEDIEVGTIIGTVMARDPDSISSPIRFSLDRHTDLDRIFNIHSGNGSLYTSKPLDRELSQWHNLTVIAAEINNPKETTRVAVFVRILDVNDNAPQFAVFYDTFVCENARPGQLIQTISAVDKDDPLGGQKFFFSLAAVNPNFTVQDNEDNTARILTRKNGFNRHEISTYLLPVVISDNDYPIQSSTGTLTIRVCACDSQGNMQSCSAEALLLPAGLSTGALIAILLCIIILLVIVVLFAALKRQRKKEPLILSKEDIRDNIVSYNDEGGGEEDTQAFDIGTLRNPAAIEEKKLRRDIIPETLFIPRRTPTAPDNTDVRDFINERLKEHDLDPTAPPYDSLATYAYEGNDSIAESLSSLESGTTEGDQNYDYLREWGPRFNKLAEMYGGGESDKDS

SEQ ID NO: 229 - protein, 796 aa, homo sapiens
MKENYCLQAALVCLGMLCHSHAFAPERRGHLRPSFHGHHEKGKEGQVLQRSKRGWVWNQFFVIEEYTGPDPVLVGRLHSDIDSGDGNIKYILSGEGAGTIFVIDDKSGNIHATKTLDREERAQYTLMAQAVDRDTNRPLEPPSEFIVKVQDINDNPPEFLHETYHANVPERSNVGTSVIQVTASDADDPTYGNSAKLVYSILEGQPYFSVEAQTGIIRTALPNMDREAKEEYHVVIQAKDMGGHMGGLSGTTKVTITLTDVNDNPPKFPQSVYQMSVSEAAVPGEEVGRVKAKDPDIGENGLVTYNIVDGDGMESFEITTDYETQEGVIKLKKPVDFETKRAYSLKVEAANVHIDPKFISNGPFKDTVTVKISVEDADEPPMFLAPSYIHEVQENAAAGTVVGRVHAKDPDAANSPIRYSIDRHTDLDRFFTINPEDGFIKTTKPLDREETAWLNITVFAAEIHNRHQEAKVPVAIRVLDVNDNAPKFAAPYEGFICESDQTKPLSNQPIVTISADDKDDTANGPRFIFSLPPEIIHNPNFTVRDNRDNTAGVYARRGGFSRQKQDLYLLPIVISDGGIPPMSSTNTLTIKVCGCDVNGALLSCNAEAYILNAGLSTGALIAILACIVILLVIVVLFVTLRRQKKEPLIVFEEEDVRENIITYDDEGGGEEDTEAFDIATLQNPDGINGFIPRKDIKPEYQYMPRPGLRPAPNSVDVDDFINTRIQEADNDPTAPPYDSIQIYGYEGRGSVAGSLSSLESATTDSDLDYDYLQNWGPRFKKLADLYGSKDTFDDDS

SEQ ID NO: 230 - protein, 291 aa, homo sapiens
MPTSSSFKHRIKEQEDYIRDWTAHREEIARISQDLALIAREINDVAGEIDSVTSSGTAPSTTLVDRVFDESLNFQKIPPLVHSKTPEGNNGRSGDPRPQAAEPPDHLTITRRRTWSRDEVMGDNLLLSSVFQFSKKIRQSIDKTAGKIRILFKDKDRNWDDIESKLRAESEVPIVKTSSMEISSILQELKRVEKQLQAINAMIDPDGTLEALNNMGFPSAMLPSPPKQKSSPVNNHHSPGQTPTLGQPEARALHPAAVSAAAEFENAESEADFSIHFNRVNPDGEEEDVTV

SEQ ID NO: 231 - protein, 359 aa, homo sapiens
MSLQRLLQHSSNGNLADFCAGPAYSSYSTLTGSLTMDDNRRIQMLADTVATLPRGRKQLALTRSSSLSDFSWSQRKLVTVEKQDNETFGFEIQSYRPQNQNACSSEMFTLICKIQEDSPAHCAGLQAGDVLANINGVSTEGFTYKQVVDLIRSSGNLLTIETLNGTMILKRTELEAKLQVLKQTLKQKWVEYRSLQLQEHRLLHGDAANCPSLENMDLDELSLFGPLPGPGPALVDRNRLSSESSCKSWLSSMTMDSEDGYQTCVSEDSSRGAFSRQTSTDDECFIPKEGDDFLRRSSSRRNRSISNTSSGSMSPLWEGNLSSMFGTLPRKSRKGSVRKQLLKFIPGLHRAVEEEESRF

SEQ ID NO: 232 - protein, 704 aa, homo sapiens
MVSPTKMIIRSPLKETDTNLKHNNGIAASTTAAGHLNVFSNDNNCNNNNTTESFPKKRSLERLELQQQQHLHEKKRARIERARSIEGAVQVSKGTGLKNVEPRVTPKELLEWQTNWKKIMKRDSRIYFDITDDVEMNTYNKSKMDKRRDLLKRGFLTLGAQITQFFDTTVTIVITRRSVENIYLLKDTDILSRAKKNYMKVWSYEKAARFLKNLDVDLDHLSKTKSASLAAPTLSNLLHNEKLYGPTDRDPRTKRDDIHYFKYPHVYLYDLWQTWAPIITLEWKPQELTNLDELPYPILKIGSFGRCPFIGDRNYDESSYKRVVKRYSRDKANKKYALQLRALFQYHADTLLNTSSVNDQTKNLIFIPHTCNDSTKSFKKWMQEKAKNFEKTELKKTDDSAVQDVRNEHADQTDEKNSILLNETETKEPPLKEEKENKQSIAEESNKYPQRKELAATPKLNHPVLATFARQETEEVPDDLCTLKTKSRQAFEIKASGAHQSNDVATSFGNGLGPTRASVMSKNMKSLSRLMVDRKLGVKQTNGNNKNYTATIATTAETSKENRHRLDFNALKKDEAPSKETGKDSAVHLETNRKPQNFPKVATKSVSADSKVHNDIKITTTESPTASKKSTSTNVTLHFNAQTAQTAQPVKKETVKNSGYCENCRVKYESLEQHIVSEKHLSFAENDLNFEAIDSLIENLRFQI

SEQ ID NO: 233 - protein, 547 aa, homo sapiens
MEDSEALGFEHMGLDPRLLQAVTDLGWSRPTLIQEKAIPLALEGKDLLARARTGSGKTAAYAIPMLQLLLHRKATGPVVEQAVRGLVLVPTKELARQAQSMIQQLATYCARDVRVANVSAAEDSVSQRAVLMEKPDVVVGTPSRILSHLQQDSLKLRDSLELLVVDEADLLFSFGFEEELKSLLCHLPRIYQAFLMSATFNEDVQALKELILHNPVTLKLQESQLPGPDQLQQFQVVCETEEDKFLLLYALLKLSLIRGKSLLFVNTLERSYRLRLFLEQFSIPTCVLNGELPLRSRCHIISQFNQGFYDCVIATDAEVLGAPVKGKRRGRGPKGDKASDPEAGVARGIDFHHVSAVLNFDLPPTPEAYIHRAGRTARANNPGIVLTFVLPTEQFHLGKIEELLSGENRGPILLPYQFRMEEIEGFRYRCRDAMRSVTKQAIREARLKEIKEELLHSEKLKTYFEDNPRDLQLLRHDLPLHPAVVKPHLGHVPDYLVPPALRGLVRPHKKRKKLSSSCRKAKRAKSQNPLRSFKHKGKKFRPTAKPS

SEQ ID NO: 234 - protein, 298 aa, homo sapiens
MSDANLDSSKKNFLEGEVDDEESVILTLVPVKDDANMEQMEPSVSSTSDVKLEKPKKYNPGHLLQTNEQFTAPQKARCKIPALPLPTILPPINKVCRDTLRDWCQQLGLSTNGKKIEVYLRLHRHAYPEQRQDMPEMSQETRLQRCSRKRKAVTKRARLQRSYEMNERAEETNTVEVITSAPGAMLASWARIAARAVQPKALNSCSIPVSVEAFLMQASGVRWCVVHGRLLSADTKGWVRLQFHAGQAWVPTTHRRMISLFLLPACIFPSPGIEDNMLCPDCAKRNKKMMKRLMTVEK

SEQ ID NO: 235 - protein, 622 aa, homo sapiens
MAMAPSPSLVQVYTSPAAVAVWEWQDGLGTWHPYSATVCSFIEQQFVQQKGQRFGLGSLAHSIPLGQADPSLAPYIIDLPSWTQFRQDTGTMRAVRRHLFPQHSAPGRGVVWEWLSDDGSWTAYEASVCDYLEQQVARGNQLVDLAPLGYNYTVNYTTHTQTNKTSSFCRSVRRQAGPPYPVTTIIAPPGHTGVACSCHQCLSGSRTGPVSGRYRHSMTNLPAYPVPQHPPHRTASVFGTHQAFAPYNKPSLSGARSAPRLNTTNAWGAAPPSLGSQPLYRSSLSHLGPQHLPPGSSTSGAVSASLPSGPSSSPGSVPATVPMQMPKPSRVQQALAGMTSVLMSAIGLPVCLSRAPQPTSPPASRLASKSHGSVKRLRKMSVKGATPKPEPEPEQVIKNYTEELKVPPDEDCIICMEKLSTASGYSDVTDSKAIGSLAVGHLTKCSHAFHLLCLLAMYCNGNKDGSLQCPSCKTIYGEKTGTQPQGKMEVLRFQMSLPGHEDCGTILIVYSIPHGIQGPEHPNPGKPFTARGFPRQCYLPDNAQGRKVLELLKVAWKRRLIFTVGTSSTTGETDTVVWNEIHHKTEMDRNITGHGYPDPNYLQNVLAELAAQGVTEDCLEQQ

SEQ ID NO: 236 - protein, 907 aa, homo sapiens
MESAIAEGGASRFSASSGGGGSRGAPQHYPKTAGNSEFLGKTPGQNAQKWIPARSTRRDDNSAANNSANEKERHDAIFRKVRGILNKLTPEKFDKLCLELLNVGVESKLILKGVILLIVDKALEEPKYSSLYAQLCLRLAEDAPNFDGPAAEGQPGQKQSTTFRRLLISKLQDEFENRTRNVDVYDKRENPLLPEEEEQRAIAKIKMLGNIKFIGELGKLDLIHESILHKCIKTLLEKKKRVQLKDMGEDLECLCQIMRTVGPRLDHERAKSLMDQYFARMCSLMLSKELPARIRFLLQDTVELREHHWVPRKAFLDNGPKTINQIRQDAVKDLGVFIPAPMAQGMRSDFFLEGPFMPPRMKMDRDPLGGLADMFGQMPGSGIGTGPGVIQDRFSPTMGRHRSNQLFNGHGGHIMPPTQSQFGEMGGKFMKSQGLSQLYHNQSQGLLSQLQGQSKDMPPRFSKKGQLNADEISLRPAQSFLMNKNQVPKLQPQITMIPPSAQPPRTQTPPLGQTPQLGLKTNPPLIQEKPAKTSKKPPPSKEELLKLTETVVTEYLNSGNANEAVNGVREMRAPKHFLPEMLSKVIILSLDRSDEDKEKASSLISLLKQEGIATSDNFMQAFLNVLDQCPKLEVDIPLVKSYLAQFAARAIISELVSISELAQPLESGTHFPLFLLCLQQLAKLQDREWLTELFQQSKVNMQKMLPEIDQNKDRMLEILEGKGLSFLFPLLKLEKELLKQIKLDPSPQTIYKWIKDNISPKLHVDKGFVNILMTSFLQYISSEVNPPSDETDSSSAPSKEQLEQEKQLLLSFKPVMQKFLHDHVDLQVSALYALQVHCYNSNFPKGMLLRFFVHFYDMEIIEEEAFLAWKEDITQEFPGKGKALFQVNQWLTWLETAEEEESEEEAD

SEQ ID NO: 237 - protein, 727 aa, homo sapiens
MPPPADIVKVAIEWPGAYPKLMEIDQKKPLSAIIKEVCDGWSLANHEYFALQHADSSNFYITEKNRNEIKNGTILRLTTSPAQNAQQLHERIQSSSMDAKLEALKDLASLSRDVTFAQEFINLDGISLLTQMVESGTERYQKLQKIMKPCFGDMLSFTLTAFVELMDHGIVSWDTFSVAFIKKIASFVNKSAIDISILQRSLAILESMVLNSHDLYQKVAQEITIGQLIPHLQGSDQEIQTYTIAVINALFLKAPDERRQEMANILAQKQLRSIILTHVIRAQRAINNEMAHQLYVLQVLTFNLLEDRMMTKMDPQDQAQRDIIFELRRIAFDAESEPNNSSGSMEKRKSMYTRDYKKLGFINHVNPAMDFTQTPPGMLALDNMLYFAKHHQDAYIRIVLENSSREDKHECPFGRSSIELTKMLCEILKVGELPSETCNDFHPMFFTHDRSFEEFFCICIQLLNKTWKEMRATSEDFNKVMQVVKEQVMRALTTKPSSLDQFKSKLQNLSYTEILKIRQSERMNQEDFQSRPILELKEKIQPEILELIKQQRLNRLVEGTCFRKLNARRRQDKFWYCRLSPNHKVLHYGDLEESPQGEVPHDSLQDKLPVADIKAVVTGKDCPHMKEKGALKQNKEVLELAFSILYDSNCQLNFIAPDKHEYCIWTDGLNALLGKDMMSDLTRNDLDTLLSMEIKLRLLDLENIQIPDAPPPIPKEPSNYDFVYDCN

SEQ ID NO: 238 - protein, 270 aa, homo sapiens
MVTAMNVSHEVNQLFQPYNFELSKDMRPFFEEYWATSFPIALIYLVLIAVGQNYMKERKGFNLQGPLILWSFCLAIFSILGAVRMWGIMGTVLLTGGLKQTVCFINFIDNSTVKFWSWVFLLSKVIELGDTAFIILRKRPLIFIHWYHHSTVLVYTSFGYKNKVPAGGWFVTMNFGVHAIMYTYYTLKAANVKPPKMLPMLITSLQILQMFVGAIVSILTYIWRQDQGCHTTMEHLFWSFILYMTYFILFAHFFCQTYIRPKVKAKTKSQ

SEQ ID NO: 239 - protein, 1142 aa, homo sapiens
MLVLRCRLGTSFPKLDNLVPKGKMKILLVFLGLLGNSVAMPMHMPRMPGFSSKSEEMMRYNQFNFMNGPHMAHLGPFFGNGLPQQFPQYQMPMWPQPPPNTWHPRKSSAPKRHNKTDQTQETQKPNQTQSKKPPQKRPLKQPSHNQPQPEEEAQPPQAFPPFGNGLFPYQQPPWQIPQRLPPPGYGRPPISNEEGGNPYFGYFGYHGFGGRPPYYSEEMFEQDFEKPKEEDPPKAESPGTEPTANSTVTETNSTQPNPKGSQGGNDTSPTGNSTPGLNTGNNPPAQNGIGPLPAVNASGQGGPGSQIPWRPSQPNIRENHPYPNIRNFPSGRQWYFTGTVMGHRQNRPFYRNQQVQRGPRWNFFAWERKQVARPGNPVYHKAYPPTSRGNYPNYAGNPANLRRKPQGPNKHPVGTTVAPLGPKPGPVVRNEKIQNPKEKPLGPKEQIIVPTKNPTSPWRNSQQYEVNKSNYKLPHSEGYMPVPNFNSVDQHENSYYPRGDSRKVPNSDGQTQSQNLPKGIVLGSRRMPYESETNQSELKHSSYQPAVYPEEIPSPAKEHFPAGRNTWDHQEISPPFKEDPGRQEEHLPHPSHGSRGSVFYPEYNPYDPRENSPYLRGNTWDERDDSPNTMGQKESPLYPINTPDQKEIVPYNEEDPVDPTGDEVFPGQNRWGEELSFKGGPTVRHYEGEQYTSNQPKEYLPYSLDNPSKPREDFYYSEFYPWSPDENFPSYNTASTMPPPIESRGYYVNNAAGPEESTLFPSRNSWDHRIQAQGQRERRPYFNRNIWDQATHLQKAPARPPDQKGNQPYYSNTPAGLQKNPIWHEGENLNYGMQITRMNSPEREHSSFPNFIPPSYPSGQKEAHLFHLSQRGSCCAGSSTGPKDNPLALQDYTPSYGLAPGENQDTSPLYTDGSHTKQTRDIISPTSILPGQRNSSEKRESQNPFRDDVSTLRRNTPCSIKNQLGQKEIMPFPEASSLQSKNTPCLKNDLGGDGNNILEQVFEDNQLNERTVDLTPEQLVIGTPDEGSNPEGIQSQVQENESERQQQRPSNILHLPCFGSKLAKHHSSTTGTPSSDGRQSPFDGDSITPTENPNTLVELATEEQFKSINVDPLDADEHSPFEFLQRGTNVQDQVQDCLLLQA

SEQ ID NO: 240 - protein, 362 aa, homo sapiens
MTQELSFQKFIEQSDLLGELKYDFNEKDEFRHTETQRPFVFNYYENVLEKNSKRYQALGHLLEQYIYELLEKVCKLEKVYIPPEADKEEPRSFFFMSEKALTNHHSALLILLQDHGVFRAGQWSQQAIIHHGLQHGSQIPCIQMALQAHYDVIVLNPNDNFVEPKVEKEWKGLLTQNIESSSLKMVQGGSFFSLQHPPKCIPKRCSNTPEEHTAYIWDYFISKTEGKDIAFIVHGYGGLVFMDLLVRRRWEVMSKVYAVALIDSEHHVGHQLGSDVQLLAWIKHHCREWVTSPKPLDKPAATVFKKEFPMVSAGTEKYILAPSSSLQSIFKYFKKALKARTTINFSRMPIVTRSSTKRKQSA

SEQ ID NO: 241 - protein, 374 aa, homo sapiens
MWFLTTLLLWVPVDGQVDTTKAVITLQPPWVSVFQEETVTLHCEVLHLPGSSSTQWFLNGTATQTSTPSYRITSASVNDSGEYRCQRGLSGRSDPIQLEIHRGWLLLQVSSRVFTEGEPLALRCHAWKDKLVYNVLYYRNGKAFKFFHWNSNLTILKTNISHNGTYHCSGMGKHRYTSAGISVTVKELFPAPVLNASVTSPLLEGNLVTLSCETKLLLQRPGLQLYFSFYMGSKTLRGRNTSSEYQILTARREDSGLYWCEAATEDGNVLKRSPELELQVLGLQLPTPVWFHVLFYLAVGIMFLVNTVLWVTIRKELKRKKKWDLEISLDSGHEKKVISSLQEDRHLEEELKCQEQKEEQLQEGVHRKEPQGAT

SEQ ID NO: 242 - protein, 330 aa, homo sapiens
MLPDWKSSLILMAYIIIFLTGLPANLLALRAFVGRIRQPQPAPVHILLLSLTLADLLLLLLLPFKIIEAASNFRWYLPKVVCALTSFGFYSSIYCSTWLLAGISIERYLGVAFPVQYKLSRRPLYGVIAALVAWVMSFGHCTIVIIVQYLNTTEQVRSGNEITCYENFTDNQLDVVLPVRLELCLVLFFIPMAVTIFCYWRFVWIMLSQPLVGAQRRRRAVGLAVVTLLNFLVCFGPYNVSHLVGYHQRKSPWWRSIAVVFSSLNASLDPLLFYFSSSVVRRAFGRGLQVLRNQGSSLLGRRGKDTAEGTNEDRGVGQGEGMPSSDFTTE

SEQ ID NO: 243 - protein, 243 aa, homo sapiens
MAAAIASSLIRQKRQARESNSDRVSASKRRSSPSKDGRSLCERHVLGVFSKVRFCSGRKRPVRRRPEPQLKGIVTRLFSQQGYFLQMHPDGTIDGTKDENSDYTLFNLIPVGLRVVAIQGVKASLYVAMNGEGYLYSSDVFTPECKFKESVFENYYVIYSSTLYRQQESGRAWFLGLNKEGQIMKGNRVKKTKPSSHFVPKPIEVCMYREPSLHEIGEKQGRSRKSSGTPTMNGGKVVNQDST

SEQ ID NO: 244 - protein, 165 aa, homo sapiens
MVTKWWGQDPPVQLRSQLMLWIMELILWKFQSSVVGSSVVTWKISDVAGPHGDHSCSLQHLEQIIGSVSNYPRYTGSRSCDRGENPVSLSKRIKCTWMLGASGFPPRCPSGRDHSRDHPGKSQVPALELANQLAAWGLWSSVVKSWGFRAGETEAPISALSSAHA

SEQ ID NO: 245 - protein, 312 aa, homo sapiens
MAQPYPPAQYPPPPQNGIPAEYAPPPPHPTQDYSGQTPVPTEHGMTLYTPAQTHPEQPGSEASTQPIAGTQTVPQTDEAAQTDSQPLHPSDPTEKQQPKRLHVSNIPFRFRDPDLRQMFGQFGKILDVEIIFNERGSKGFGFVTFETSSDADRAREKLNGTIVEGRKIEVNNATARVMTNKKTGNPYTNGWKLNPVVGAVYGPEFYAVTGFPYPTTGTAVAYRGAHLRGRGRAVYNTFRAAPPPPPIPTYGAVVYQDGFYGAEIYGGYAAYRYAQPAAAAAAYSDSYGRVYAAADPYHHTIGPAATYSIGTM

SEQ ID NO: 246 - protein, 163 aa, homo sapiens
MCMNTSIHAHTYARTHTHSVFMSSNVTVFQWMRLMRASSRSFTQAIPAGQLLQTACSHLFTTQNTCQNALGNNTRLQHTEKVRLSIGLADFGLPGIARNTFVVPDSISRYCREGSVIGKCCPSRKSALLNKQGSLKKFKITRGETQPGVTISVLELAEIDQRF

SEQ ID NO: 247 - protein, 2386 aa, homo sapiens
MLRGPGPGLLLLAVQCLGTAVPSTGASKSKRQAQQMVQPQSPVAVSQSKPGCYDNGKHYQINQQWERTYLGNALVCTCYGGSRGFNCESKPEAEETCFDKYTGNTYRVGDTYERPKDSMIWDCTCIGAGRGRISCTIANRCHEGGQSYKIGDTWRRPHETGGYMLECVCLGNGKGEWTCKPIAEKCFDHAAGTSYVVGETWEKPYQGWMMVDCTCLGEGSGRITCTSRNRCNDQDTRTSYRIGDTWSKKDNRGNLLQCICTGNGRGEWKCERHTSVQTTSSGSGPFTDVRAAVYQPQPHPQPPPYGHCVTDSGVVYSVGMQWLKTQGNKQMLCTCLGNGVSCQETAVTQTYGGNSNGEPCVLPFTYNGRTFYSCTTEGRQDGHLWCSTTSNYEQDQKYSFCTDHTVLVQTRGGNSNGALCHFPFLYNNHNYTDCTSEGRRDNMKWCGTTQNYDADQKFGFCPMAAHEEICTTNEGVMYRIGDQWDKQHDMGHMMRCTCVGNGRGEWTCIAYSQLRDQCIVDDITYNVNDTFHKRHEEGHMLNCTCFGQGRGRWKCDPVDQCQDSETGTFYQIGDSWEKYVHGVRYQCYCYGRGIGEWHCQPLQTYPSSSGPVEVFITETPSQPNSHPIQWNAPQPSHISKYILRWRPKNSVGRWKEATIPGHLNSYTIKGLKPGVVYEGQLISIQQYGHQEVTRFDFTTTSTSTPVTSNTVTGETTPFSPLVATSESVTEITASSFVVSWVSASDTVSGFRVEYELSEEGDEPQYLDLPSTATSVNIPDLLPGRKYIVNVYQISEDGEQSLILSTSQTTAPDAPPDTTVDQVDDTSIVVRWSRPQAPITGYRIVYSPSVEGSSTELNLPETANSVTLSDLQPGVQYNITIYAVEENQESTPVVIQQETTGTPRSDTVPSPRDLQFVEVTDVKVTIMWTPPESAVTGYRVDVIPVNLPGEHGQRLPISRNTFAEVTGLSPGVTYYFKVFAVSHGRESKPLTAQQTTKLDAPTNLQFVNETDSTVLVRWTPPRAQITGYRLTVGLTRRGQPRQYNVGPSVSKYPLRNLQPASEYTVSLVAIKGNQESPKATGVFTTLQPGSSIPPYNTEVTETTIVITWTPAPRIGFKLGVRPSQGGEAPREVTSDSGSIVVSGLTPGVEYVYTIQVLRDGQERDAPIVNKVVTPLSPPTNLHLEANPDTGVLTVSWERSTTPDITGYRITTTPTNGQQGNSLEEVVHADQSSCTFDNLSPGLEYNVSVYTVKDDKESVPISDTIIPAVPPPTDLRFTNIGPDTMRVTWAPPPSIDLTNFLVRYSPVKNEEDVAELSISPSDNAVVLTNLLPGTEYVVSVSSVYEQHESTPLRGRQKTGLDSPTGIDFSDITANSFTVHWIAPRATITGYRIRHHPEHFSGRPREDRVPHSRNSITLTNLTPGTEYVVSIVALNGREESPLLIGQQSTVSDVPRDLEVVAATPTSLLISWDAPAVTVRYYRITYGETGGNSPVQEFTVPGSKSTATISGLKPGVDYTITVYAVTGRGDSPASSKPISINYRTEIDKPSQMQVTDVQDNSISVKWLPSSSPVTGYRVTTTPKNGPGPTKTKTAGPDQTEMTIEGLQPTVEYVVSVYAQNPSGESQPLVQTAVTNIDRPKGLAFTDVDVDSIKIAWESPQGQVSRYRVTYSSPEDGIHELFPAPDGEEDTAELQGLRPGSEYTVSVVALHDDMESQPLIGTQSTAIPAPTDLKFTQVTPTSLSAQWTPPNVQLTGYRVRVTPKEKTGPMKEINLAPDSSSVVVSGLMVATKYEVSVYALKDTLTSRPAQGVVTTLENVSPPRRARVTDATETTITISWRTKTETITGFQVDAVPANGQTPIQRTIKPDVRSYTITGLQPGTDYKIYLYTLNDNARSSPVVIDASTAIDAPSNLRFLATTPNSLLVSWQPPRARITGYIIKYEKPGSPPREVVPRPRPGVTEATITGLEPGTEYTIYVIALKNNQKSEPLIGRKKTDELPQLVTLPHPNLHGPEILDVPSTVQKTPFVTHPGYDTGNGIQLPGTSGQQPSVGQQMIFEEHGFRRTTPPTTATPIRHRPRPYPPNVGEEIQIGHIPREDVDYHLYPHGPGLNPNASTGQEALSQTTISWAPFQDTSEYIISCHPVGTDEEPLQFRVPGTSTSATLTGLTRGATYNVIVEALKDQQRHKVREEVVTVGNSVNEGLNQPTDDSCFDPYTVSHYAVGDEWERMSESGFKLLCQCLGFGSGHFRCDSSRWCHDNGVNYKIGEKWDRQGENGQMMSCTCLGNGKGEFKCDPHEATCYDDGKTYHVGEQWQKEYLGAICSCTCFGGQRGWRCDNCRRPGGEPSPEGTTGQSYNQYSQRYHQRTNTNVNCPIECFMPLDVQADREDSRE

SEQ ID NO: 248 - protein, 715 aa, homo sapiens
MMQESATETISNSSMNQNGMSTLSSQLDAGSRDGRSSGDTSSEVSTVELLHLQQQQALQAARQLLLQQQTSGLKSPKSSDKQRPLQVPVSVAMMTPQVITPQQMQQILQQQVLSPQQLQALLQQQQAVMLQQQQLQEFYKKQQEQLHLQLLQQQQQQQQQQQQQQQQQQQQQQQQQQQQQQQQQQQQQQQQHPGKQAKEQQQQQQQQQQLAAQQLVFQQQLLQMQQLQQQQHLLSLQRQGLISIPPGQAALPVQSLPQAGLSPAEIQQLWKEVTGVHSMEDNGIKHGGLDLTTNNSSSTTSSNTSKASPPITHHSIVNGQSSVLSARRDSSSHEETGASHTLYGHGVCKWPGCESICEDFGQFLKHLNNEHALDDRSTAQCRVQMQVVQQLEIQLSKERERLQAMMTHLHMRPSEPKPSPKPLNLVSSVTMSKNMLETSPQSLPQTPTTPTAPVTPITQGPSVITPASVPNVGAIRRRHSDKYNIPMSSEIAPNYEFYKNADVRPPFTYATLIRQAIMESSDRQLTLNEIYSWFTRTFAYFRRNAATWKNAVRHNLSLHKCFVRVENVKGAVWTVDEVEYQKRRSQKITGSPTLVKNIPTSLGYGAALNASLQAALAESSLPLLSNPGLINNASSGLLQAVHEDLNGSLDHIDSNGNSSPGCSPQPHIHSIHVKEEPVIAEDEDCPMSLVTTANHSPELEDDREIEEEPLSEDLE

SEQ ID NO: 249 - protein, 445 aa, homo sapiens
MNEEYDVIVLGTGLTECILSGIMSVNGKKVLHMDRNPYYGGESASITPLEDLYKRFKIPGSPPESMGRGRDWNVDLIPKFLMANGQLVKMLLYTEVTRYLDFKVTEGSFVYKGGKIYKVPSTEAEALASSLMGLFEKRRFRKFLVYVANFDEKDPRTFEGIDPKKTTMRDVYKKFDLGQDVIDFTGHALALYRTDDYLDQPCYETINRIKLYSESLARYGKSPYLYPLYGLGELPQGFARLSAIYGGTYMLNKPIEEIIVQNGKVIGVKSEGEIARCKQLICDPSYVKDRVEKVGQVIRVICILSHPIKNTNDANSCQIIIPQNQVNRKSDIYVCMISFAHNVAAQGKYIAIVSTTVETKEPEKEIRPALELLEPIEQKFVSISDLLVPKDLGTESQIFISRTYDATTHFETTCDDIKNIYKRMTGSEFDFEEMKRKKNDIYGED

SEQ ID NO: 250 - protein, 218 aa, homo sapiens
MTSEFFAAQLRAQISDDTTHPISYYKPEFYTPVDGGTAHLSVVAEDGSAVSATSTINLYFGSKVRSPVSEILFNDEMDDFSSPNITNEFGVPPSPANFIQPGKQPLSSMCPTIMVGQDGQPPSHADHTPMPQAIIYNLWFGYDVKRAVEEPRLHNQLLPNVTTVERNIDQAVTAALETRHHHTQIASTFIAVVQAIVRTAGGWAAASDSRKGGEPAGY

SEQ ID NO: 251 - protein, 553 aa, homo sapiens
MAAPKTAAVGPLVGAVVQGTNSTRFLVFNSKTAELLSHHKVELTQEFPKEGWVEQDPKEILQSVYECIARTCEKLDELNIDISNIKAVGVSNQRETTVIWDKLTGEPLYNAVVWLDLRTQTTVEDLSKKIPGNSNFVKSKTGLPLSTYFSAVKLRWMLDNVRNVQKAVEEGRALFGTIDSWLIWSLTGGVNGGVHCTDVTNASRTMLFNIHSLEWDKELCDFFEIPMDLLPNVFSSSEIYGLIKTGALEGVPISGCLGDQCAALVGQMCFQEGQAKNTYGTGCFLLCNTGRKCVFSEHGLLTTVAYKLGREKPAYYALEGSVAIAGAVIRWLRDNLGIIETSGDIERLAKEVGTSYGCYFVPAFSGLYAPYWEPSARGILCGLTQFTNKCHIAFAALEAVCFQTREILEAMNRDCGIPLRHLQVDGGMTNNKVLMQLQADILHIPVIKPFMPETTALGAAMAAGAAEGVSVWSLEPQALSVLRMERFEPQIQATESEIRYATWKKAVMKSMGWVTSQSPEGGDPSIFSSLPLGFFIVSSMVMLIGARYISGVP

SEQ ID NO: 252 - protein, 363 aa, homo sapiens
MGPGEALLAGLLVMVLAVALLSNALVLLCCAYSAELRTRASGVLLVNLSLGHLLLAALDMPFTLLGVMRGRTPSAPGACQVIGFLDTFLASNAALSVAALSADQWLAVGFPLRYAGRLRPRYAGLLLGCAWGQSLAFSGAALGCSWLGYSSAFASCSLRLPPEPERPRFAAFTATLHAVGFVLPLAVLCLTSLQVHRVARRHCQRMDTVTMKALALLADLHPSVRQRCLIQQKRRRHRATRKIGIAIATFLICFAPYVMTRLAELVPFVTVNAQWGILSKCLTYSKAVADPFTYSLLRRPFRQVLAGMVHRLLKRTPRPASTHDSSLDVAGMVHQLLKRTPRPASTHNGSVDTENDSCLQQTH

SEQ ID NO: 253 - protein, 349 aa, homo sapiens
MAIPITVLDCDLLLYGRGHRTLDRFKLDDVTDEYLMSMYGFPRQFIYYLVELLGANLSRPTQRSRAISPETQVLAALGFYTSGSFQTRMGDAIGISQASMSRCVANVTEALVERASQFIRFPADEASIQALKDEFYGLAGMPGVMGVVDCIHVAIKAPNAEDLSYVNRKGLHSLNCLMVCDIRGTLMTVETNWPGSLQDCAVLQQSSLSSQFEAGMHKDSWLLGDSSFFLRTWLMTPLHIPETPAEYRYNMAHSATHSVIEKTFRTLCSRFRCLDGSKGALQYSPEKSSHIILACCVLHNISLEHGMDVWSSPMTGPMEQPPEEEYEHMESLDLEADRIRQELMLTHFS

SEQ ID NO: 254 - protein, 484 aa, homo sapiens
MDLGKDQSHLKHHQTPDPHQEENHSPEVIGTWSLRNRELLRKRKAEVHEKETSQWLFGEQKKRKQQRTGKGNRRGRKRQQNTELKVEPQPQIEKEIVEKALAPIEKKTEPPGSITKVFPSVASPQKVVPEEHFSEICQESNIYQENFSEYQEIAVQNHSSETCQHVSEPEDLSPKMYQEISVLQDNSSKICQDMKEPEDNSPNTCQVISVIQDHPFKMYQDMAKREDLAPKMCQEAAVPKILPCPTSEDTADLAGCSLQAYPKPDVPKGYILDTDQNPAEPEEYNETDQGIAETEGLFPKIQEIAEPKDLSTKTHQESAEPKYLPHKTCNEIIVPKAPSHKTIQETPHSEDYSIEINQETPGSEKYSPETYQEIPGLEEYSPEIYQETSQLEEYSPEIYQETPGPEDLSTETYKNKDVPKECFPEPHQETGGPQGQDPKAHQEDAKDAYTFPQEMKEKPKEEPGIPAILNESHPENDVYSYVLF

SEQ ID NO: 255 - protein, 131 aa, homo sapiens
MSGRGKQGGKARAKSKSRSSRAGLQFPVGRIHRLLRKGNYAERIGAGAPVYLAAVLEYLTAEILELAGNASRDNKKTRIIPRHLQLAIRNDEELNKLLGGVTIAQGGVLPNIQAVLLPKKTESHHHKAQSK

SEQ ID NO: 256 - protein, 90 aa, homo sapiens
MPKRKAEGDAKGDKAKVKDEPQRRSARLSAKPAPPKPEPKPKKAPAKKGEKVPKGKKGKADAGKEGNNPAENGDAKTDQAQKAEGAGDAK

SEQ ID NO: 257 - protein, 330 aa, homo sapiens
MTTSLLLHPRWPESLMYVYEDSAAESGIGGGGGGGGGGTGGAGGGCSGASPGKAPSMDGLGSSCPASHCRDLLPHPVLGRPPAPLGAPQGAVYTDIPAPEAARQCAPPPAPPTSSSATLGYGYPFGGSYYGCRLSHNVNLQQKPCAYHPGDKYPEPSGALPGDDLSSRAKEFAFYPSFASSYQAMPGYLDVSVVPGISGHPEPRHDALIPVEGYQHWALSNGWDSQVYCSKEQSQSAHLWKSPFPDVVPLQPEVSSYRRGRKKRVPYTKVQLKELEKEYAASKFITKEKRRRISATTNLSERQVTIWFQNRRVKEKKVVSKSKAPHLHST

SEQ ID NO: 258 - protein, 371 aa, homo sapiens
MAAPALRLCHIAFHVPAGQPLARNLQRLFGFQPLASREVDGWRQLALRSGDAVFLVNEGAGSGEPLYGLDPRHAVPSATNLCFDVADAGAATRELAALGCSVPVPPVRVRDAQGAATYAVVSSPAGILSLTLLERAGYRGPFLPGFRPVSSAPGPGWVSRVDHLTLACTPGSSPTLLRWFHDCLGFCHLPLSPGEDPELGLEMTAGFGLGGLRLTALQAQPGSIVPTLVLAESLPGATTRQDQVEQFLARHKGPGLQHVGLYTPNIVEATEGVATAGGQFLAPPGAYYQQPGKERQIRAAGHEPHLLARQGILLDGDKGKFLLQVFTKSLFTEDTFFLELIQRQGATGFGQGNIRALWQSVQEQSARSQEA

SEQ ID NO: 259 - protein, 115 aa, homo sapiens
MLGLLGSTALVGWITGAAVAVLLLLLLLATCLFHGRQDCDVERNRTAAGGNRVRRAQPWPFRRRGHLGIFHHHRHPGHVSHVPNVGLHHHHHPRHTPHHLHHHHHPHRHHPRHAR

SEQ ID NO: 260 - protein, 487 aa, homo sapiens
MSLPNSSCLLEDKMCEGNKTTMASPQLMPLVVVLSTICLVTVGLNLLVLYAVRSERKLHTVGNLYIVSLSVADLIVGAVVMPMNILYLLMSKWSLGRPLCLFWLSMDYVASTASIFSVFILCIDRYRSVQQPLRYLKYRTKTRASATILGAWFLSFLWVIPILGWNHFMQQTSVRREDKCETDFYDVTWFKVMTAIINFYLPTLLMLWFYAKIYKAVRQHCQHRELINRSLPSFSEIKLRPENPKGDAKKPGKESPWEVLKRKPKDAGGGSVLKSPSQTPKEMKSPVVFSQEDDREVDKLYCFPLDIVHMQAAAEGSSRDYVAVNRSHGQLKTDEQGLNTHGASEISEDQMLGDSQSFSRTDSDTTTETAPGKGKLRSGSNTGLDYIKFTWKRLRSHSRQYVSGLHMNRERKAAKQLGFIMAAFILCWIPYFIFFMVIAFCKNCCNEHLHMFTIWLGYINSTLNPLIYPLCNENFKKTFKRILHIRS

SEQ ID NO: 261 - protein, 390 aa, homo sapiens
MGQRLSGGRSCLDVPGRLLPQPPPPPPPVRRKLALLFAMLCVWLYMFLYSCAGSCAAAPGLLLLGSGSRAAHDPPALATAPDGTPPRLPFRAPPATPLASGKEMAEGAASPEEQSPEVPDSPSPISSFFSGSGSKQLPQAIIIGVKKGGTRALLEFLRVHPDVRAVGAEPHFFDRSYDKGLAWYRDLMPRTLDGQITMEKTPSYFVTREAPARISAMSKDTKLIVVVRDPVTRAISDYTQTLSKRPDIPTFESLTFKNRTAGLIDTSWSAIQIGIYAKHLEHWLRHFPIRQMLFVSGERLISDPAGELGRVQDFLGLKRIITDKHFYFNKTKGFPCLKKAEGSSRPHCLGKTKGRTHPEIDREVVRRLREFYRPFNLKFYQMTGHDFGWD

SEQ ID NO: 262 - protein, 372 aa, homo sapiens
MGWSCLVTGAGGLLGQRIVRLLVEEKELKEIRALDKAFRPELREEFSKLQNRTKLTVLEGDILDEPFLKRACQDVSVVIHTACIIDVFGVTHRESIMNVNVKGTQLLLEACVQASVPVFIYTSSIEVAGPNSYKEIIQNGHEEEPLENTWPTPYPYSKKLAEKAVLAANGWNLKNGDTLYTCALRPTYIYGEGGPFLSASINEALNNNGILSSVGKFSTVNPVYVGNVAWAHILALRALRDPKKAPSVRGQFYYISDDTPHQSYDNLNYILSKEFGLRLDSRWSLPLTLMYWIGFLLEVVSFLLSPIYSYQPPFNRHTVTLSNSVFTFSYKKAQRDLAYKPLYSWEEAKQKTVEWVGSLVDRHKETLKSKTQ

SEQ ID NO: 263 - protein, 482 aa, homo sapiens
MDSFGQPRPEDNQSVVRRMQKKYWKTKQVFIKATGKKEDEHLVASDAELDAKLEVFHSVQETCTELLKIIEKYQLRLNVISEEENELGLFLKFQAERDATQAGKMMDATGKALCSSAKQRLALCTPLSRLKQEVATFSQRAVSDTLMTINRMEQARTEYRGALLWMKDVSQELDPDTLKQMEKFRKVQMQVRNSKASFDKLKMDVCQKVDLLGASRCNMLSHSLTTYQRTLLGFWKKTARMMSQIHEACIGFHPYDFVALKQLQDTPSKISEDNKDEQIGGFLTEQLNKLVLSDEEASFESEQANKDHNEKHSQMREFGAPQFSNSENVAKDLPVDSLEGEDFEKEFSFLNNLLSSGSSSTSEFTQECQTAFGSPSASLTSQEPSMGSEPLAHSSRFLPSQLFDLGFHVAGAFNNWVSQEESELCLSHTDNQPVPSQSPKKLTRSPNNGNQDMSAWFNLFADLDPLSNPDAIGHSDDELLNA

SEQ ID NO: 264 - protein, 420 aa, homo sapiens
MLHFHYYDTSNKIMEPHRPNVKTAVPLSLESYHISEEYGFLLPDSLKELPDHYRPWMEIANKLPQLIDAHQLQAHVDKMPLLSCQFLKGHREQRLAHLVLSFLTMGYVWQEGEAQPAEVLPRNLALPFVEVSRNLGLPPILVHSDLVLTNWTKKDPDGFLEIGNLETIISFPGGESLHGFILVTALVEKEAVPGIKALVQATNAILQPNQEALLQALQRLRLSIQDITKTLGQMHDYVDPDIFYAGIRIFLSGWKDNPAMPAGLMYEGVSQEPLKYSGGSAAQSTVLHAFDEFLGIRHSKESGDFLYRMRDYMPPSHKAFIEDIHSAPSLRDYILSSGQDHLLTAYNQCVQALAELRSYHITMVTKYLITAAAKAKHGKPNHLPGPPQALKDRGTGGTAVMSFLKSVRDKTLESILHPRG

SEQ ID NO: 265 - protein, 178 aa, homo sapiens
MHSSALLCCLVLLTGVRASPGQGTQSENSCTHFPGNLPNMLRDLRDAFSRVKTFFQMKDQLDNLLLKESLLEDFKGYLGCQALSEMIQFYLEEVMPQAENQDPDIKAHVNSLGENLKTLRLRLRRCHRFLPCENKSKAVEQVKNAFNKLQEKGIYKAMSEFDIFINYIEAYMTMKIRN

SEQ ID NO: 266 - protein, 155 aa, homo sapiens
MTPGKTSLVSLLLLLSLEAIVKAGITIPRNPGCPNSEDKNFPRTVMVNLNIHNRNTNTNPKRSSDYYNRSTSPWNLHRNEDPERYPSVIWEAKCRHLGCINADGNVDYHMNSVPIQQEILVLRREPPHCPNSFRLEKILVSVGCTCVTPIVHHVA

SEQ ID NO: 267 - protein, 193 aa, homo sapiens
MAAEPVEDNCINFVAMKFIDNTLYFIAEDDENLESDYFGKLESKLSVIRNLNDQVLFIDQGNRPLFEDMTDSDCRDNAPRTIFIISMYKDSQPRGMAVTISVKCEKISTLSCENKIISFKEMNPPDNIKDTKSDIIFFQRSVPGHDNKMQFESSSYEGYFLACEKERDLFKLILKKEDELGDRSIMFTVQNED

SEQ ID NO: 268 - protein, 269 aa, homo sapiens
MAEVPELASEMMAYYSGNEDDLFFEADGPKQMKCSFQDLDLCPLDGGIQLRISDHHYSKGFRQAASVVVAMDKLRKMLVPCPQTFQENDLSTFFPFIFEEEPIFFDTWDNEAYVHDAPVRSLNCTLRDSQQKSLVMSGPYELKALHLQGQDMEQQVVFSMSFVQGEESNDKIPVALGLKEKNLYLSCVLKDDKPTLQLESVDPKNYPKKKMEKRFVFNKIEINNKLEFESAQFPNWYISTSQAENMPVFLGGTKGGQDITDFTMQFVSS

SEQ ID NO: 269 - protein, 597 aa, homo sapiens
MAAVQAAEVKVDGSEPKLSKNELKRRLKAEKKVAEKEAKQKELSEKQLSQATAAATNHTTDNGVGPEEESVDPNQYYKIRSQAIHQLKVNGEDPYPHKFHVDISLTDFIQKYSHLQPGDHLTDITLKVAGRIHAKRASGGKLIFYDLRGEGVKLQVMANSRNYKSEEEFIHINNKLRRGDIIGVQGNPGKTKKGELSIIPYEITLLSPCLHMLPHLHFGLKDKETRYRQRYLDLILNDFVRQKFIIRSKIITYIRSFLDELGFLEIETPMMNIIPGGAVAKPFITYHNELDMNLYMRIAPELYHKMLVVGGIDRVYEIGRQFRNEGIDLTHNPEFTTCEFYMAYADYHDLMEITEKMVSGMVKHITGSYKVTYHPDGPEGQAYDVDFTPPFRRINMVEELEKALGMKLPETNLFETEETRKILDDICVAKAVECPPPRTTARLLDKLVGEFLEVTCINPTFICDHPQIMSPLAKWHRSKEGLTERFELFVMKKEICNAYTELNDPMRQRQLFEEQAKAKAAGDDEAMFIDENFCTALEYGLPPTAGWGMGIDRVAMFLTDSNNIKEVLLFPAMKPEDKKENVATTDTLESTTVGTSV

SEQ ID NO: 270 - protein, 674 aa, homo sapiens
MQSREDAPRSRRLASPRGGKRPKKIHKPTVSAFFTGPEELKDTAHSAALLAQLKSFYDARLLCDVTIEVVTPGSGPGTGRLFPCNRNVLAAACPYFKSMFTGGMYESQQASVTMHDVDAESFEVLVDYCYTGRVSLSEANVERLYAASDMLQLEYVREACASFLARRLDLTNCTAILKFADAFGHRKLRSQAQSYIAQNFKQLSHMGSIREETLADLTLAQLLAVLRLDSLDVESEQTVCHVAVQWLEAAPKERGPSAAEVFKCVRWMHFTEEDQDYLEGLLTKPIVKKYCLDVIEGALQMRYGDLLYKSLVPVPNSSSSSSSSNSLVSAAENPPQRLGMCAKEMVIFFGHPRDPFLCCDPYSGDLYKVPSPLTCLAHTRTVTTLAVCISPDHDIYLAAQPRTDLWVYKPAQNSWQQLADRLLCREGMDVAYLNGYIYILGGRDPITGVKLKEVECYNVKRNQWALVAPLPHSFLSFDLMVIRDYLYALNSKRMFCYDPSHNMWLKCVSLKRNDFQEACVFNEEIYCICDIPVMKVYNPVRAEWRQMNNIPLVSETNNYRIIKHGQKLLLITSRTPQWKKNRVTVYEYDIRGDQWINIGTTLGLLQFDSNFFCLSARVYPSCLEPGQSFLTEEEEIPSESSTEWDLGGFSEPDSESGSSSSLSDDDFWVRVAPQ

SEQ ID NO: 271 - protein, 499 aa, homo sapiens
MTVATGDPADEAAALPGHPQDTYDPEADHECCERVVINISGLRFETQLKTLAQFPETLLGDPKKRMRYFDPLRNEYFFDRNRPSFDAILYYYQSGGRLRRPVNVPLDIFSEEIRFYELGEEAMEMFREDEGYIKEEERPLPENEFQRQVWLLFEYPESSGPARIIAIVSVMVILISIVSFCLETLPIFRDENEDMHGSGVTFHTYSNSTIGYQQSTSFTDPFFIVETLCIIWFSFEFLVRFFACPSKAGFFTNIMNIIDIVAIIPYFITLGTELAEKPEDAQQGQQAMSLAILRVIRLVRVFRIFKLSRHSKGLQILGQTLKASMRELGLLIFFLFIGVILFSSAVYFAEADERESQFPSIPDAFWWAVVSMTTVGYGDMVPTTIGGKIVGSLCAIAGVLTIALPVPVIVSNFNYFYHRETEGEEQAQYLQVTSCPKIPSSPDLKKSRSASTISKSDYMEIQEGVNNSNEDFREENLKTANCTLANTNYVNITKMLTDV

SEQ ID NO: 272 - protein, 1044 aa, homo sapiens
MKPGCAAGSPGNEWIFFSTDEITTRYRNTMSNGGLQRSVILSALILLRAVTGFSGDGRAIWSKNPNFTPVNESQLFLYDTFPKNFFWGIGTGALQVEGSWKKDGKGPSIWDHFIHTHLKNVSSTNGSSDSYIFLEKDLSALDFIGVSFYQFSISWPRLFPDGIVTVANAKGLQYYSTLLDALVLRNIEPIVTLYHWDLPLALQEKYGGWKNDTIIDIFNDYATYCFQMFGDRVKYWITIHNPYLVAWHGYGTGMHAPGEKGNLAAVYTVGHNLIKAHSKVWHNYNTHFRPHQKGWLSITLGSHWIEPNRSENTMDIFKCQQSMVSVLGWFANPIHGDGDYPEGMRKKLFSVLPIFSEAEKHEMRGTADFFAFSFGPNNFKPLNTMAKMGQNVSLNLREALNWIKLEYNNPRILIAENGWFTDSRVKTEDTTAIYMMKNFLSQVLQAIRLDEIRVFGYTAWSLLDGFEWQDAYTIRRGLFYVDFNSKQKERKPKSSAHYYKQIIRENGFSLKESTPDVQGQFPCDFSWGVTESVLKPESVASSPQFSDPHLYVWNATGNRLLHRVEGVRLKTRPAQCTDFVNIKKQLEMLARMKVTHYRFALDWASVLPTGNLSAVNRQALRYYRCVVSEGLKLGISAMVTLYYPTHAHLGLPEPLLHADGWLNPSTAEAFQAYAGLCFQELGDLVKLWITINEPNRLSDIYNRSGNDTYGAAHNLLVAHALAWRLYDRQFRPSQRGAVSLSLHADWAEPANPYADSHWRAAERFLQFEIAWFAEPLFKTGDYPAAMREYIASKHRRGLSSSALPRLTEAERRLLKGTVDFCALNHFTTRFVMHEQLAGSRYDSDRDIQFLQDITRLSSPTRLAVIPWGVRKLLRWVRRNYGDMDIYITASGIDDQALEDDRLRKYYLGKYLQEVLKAYLIDKVRIKGYYAFKLAEEKSKPRFGFFTSDFKAKSSIQFYNKVISSRGFPFENSSSRCSQTQENTECTVCLFLVQKKPLIFLGCCFFSTLVLLLSIAIFQRQKRRKFWKAKNLQHIPLKKGKRVVS

SEQ ID NO: 273 - protein, 486 aa, homo sapiens
MDSSVIQRKKVAVIGGGLVGSLQACFLAKRNFQIDVYEAREDTRVATFTRGRSINLALSHRGRQALKAVGLEDQIVSQGIPMRARMIHSLSGKKSAIPYGTKSQYILSVSRENLNKDLLTAAEKYPNVKMHFNHRLLKCNPEEGMITVLGSDKVPKDVTCDLIVGCDGAYSTVRSHLMKKPRFDYSQQYIPHGYMELTIPPKNGDYAMEPNYLHIWPRNTFMMIALPNMNKSFTCTLFMPFEEFEKLLTSNDVVDFFQKYFPDAIPLIGEKLLVQDFFLLPAQPMISVKCSSFHFKSHCVLLGDAAHAIVPFFGQGMNAGFEDCLVFDELMDKFSNDLSLCLPVFSRLRIPDDHAISDLSMYNYIEMRAHVNSSWFIFQKNMERFLHAIMPSTFIPLYTMVTFSRIRYHEAVQRWHWQKKVINKGLFFLGSLIAISSTYLLIHYMSPRSFLRLRRPWNWIAHFRNTTCFPAKAVDSLEQISNLISR

SEQ ID NO: 274 - protein, 584 aa, homo sapiens
MSVRYSSSKHYSSSRSGGGGGGGGCGGGGGVSSLRISSSKGSLGGGFSSGGFSGGSFSRGSSGGGCFGGSSGGYGGLGGFGGGSFRGSYGSSSFGGSYGGIFGGGSFGGGSFGGGSFGGGGFGGGGFGGGFGGGFGGDGGLLSGNEKVTMQNLNDRLASYLDKVRALEESNYELEGKIKEWYEKHGNSHQGEPRDYSKYYKTIDDLKNQILNLTTDNANILLQIDNARLAADDFRLKYENEVALRQSVEADINGLRRVLDELTLTKADLEMQIESLTEELAYLKKNHEEEMKDLRNVSTGDVNVEMNAAPGVDLTQLLNNMRSQYEQLAEQNRKDAEAWFNEKSKELTTEIDNNIEQISSYKSEITELRRNVQALEIELQSQLALKQSLEASLAETEGRYCVQLSQIQAQISALEEQLQQIRAETECQNTEYQQLLDIKIRLENEIQTYRSLLEGEGSSGGGGRGGGSFGGGYGGGSSGGGSSGGGHGGGHGGSSGGGYGGGSSGGGSSGGGYGGGSSSGGHGGSSSGGYGGGSSGGGGGGYGGGSSGGGSSSGGGYGGGSSSGGHKSSSSGSVGESSSKGPRY

SEQ ID NO: 275 - protein, 295 aa, homo sapiens
MELSQLLNEIRANYEKILTRNQIETVLSTRIQLEEDISKKMDKDEEALKAAQAELKEARRQWHHLQVEIESLHAVERGLENSLHASEQHYQMQLQDLETVIEGLEKELQEVRRGIEKQLQEHEMLLNTKMRLEQEIATYRHLLEKEEIRYYGCIQGGKKDKKPTTSRVGFVLPSAIINEISFTTKVPQKYENENVETVTKQAILNGSIVKESTEAHGTIQTEKVDEVIKEWEGSFFKDNPRLRKKSVSLRFDLHLAATDEGCLETKQDNLPDIEVRLIMRRSCSIPSIKPPSTAN

SEQ ID NO: 276 - protein, 176 aa, homo sapiens
MKPLLLAVSLGLIAALQAHHLLASDEEIQDVSGTWYLKAMTVDREFPEMNLESVTPMTLTTLEGGNLEAKVTMLISGRCQEVKAVLEKTDEPGKYTADGGKHVAYIIRSHVKDHYIFYCEGELHGKPVRGVKLVGRDPKNNLEALEDFEKAAGARGLSTESILIPRQSETCSPGSD

SEQ ID NO: 277 - protein, 911 aa, homo sapiens
MAASQTSQTVASHVPFADLCSTLERIQKSKGRAEKIRHFREFLDSWRKFHDALHKNHKDVTDSFYPAMRLILPQLERERMAYGIKETMLAKLYIELLNLPRDGKDALKLLNYRTPTGTHGDAGDFAMIAYFVLKPRCLQKGSLTIQQVNDLLDSIASNNSAKRKDLIKKSLLQLITQSSALEQKWLIRMIIKDLKLGVSQQTIFSVFHNDAAELHNVTTDLEKVCRQLHDPSVGLSDISITLFSAFKPMLAAIADIEHIEKDMKHQSFYIETKLDGERMQMHKDGDVYKYFSRNGYNYTDQFGASPTEGSLTPFIHNAFKADIQICILDGEMMAYNPNTQTFMQKGTKFDIKRMVEDSDLQTCYCVFDVLMVNNKKLGHETLRKRYEILSSIFTPIPGRIEIVQKTQAHTKNEVIDALNEAIDKREEGIMVKQPLSIYKPDKRGEGWLKIKPEYVSGLMDELDILIVGGYWGKGSRGGMMSHFLCAVAEKPPPGEKPSVFHTLSRVGSGCTMKELYDLGLKLAKYWKPFHRKAPPSSILCGTEKPEVYIEPCNSVIVQIKAAEIVPSDMYKTGCTLRFPRIEKIRDDKEWHECMTLDDLEQLRGKASGKLASKHLYIGGDDEPQEKKRKAAPKMKKVIGIIEHLKAPNLTNVNKISNIFEDVEFCVMSGTDSQPKPDLENRIAEFGGYIVQNPGPDTYCVIAGSENIRVKNIILSNKHDVVKPAWLLECFKTKSFVPWQPRFMIHMCPSTKEHFAREYDCYGDSYFIDTDLNQLKEVFSGIKNSNEQTPEEMASLIADLEYRYSWDCSPLSMFRRHTVYLDSYAVINDLSTKNEGTRLAIKALELRFHGAKVVSCLAEGVSHVIIGEDHSRVADFKAFRRTFKRKFKILKESWVTDSIDKCELQEENQYLI

SEQ ID NO: 278 - protein, 94 aa, homo sapiens
MAHHSLNTFYIWHNNVLHTHLVFFLPHLLNQPFSRGSFLIWLLLCWNSWYHLRTLRRQANQANKLSMMLLRVKQSPGTKLCHGDSELTSGLLAT

SEQ ID NO: 279 - protein, 117 aa, homo sapiens
MFTLLLSNYYSRLEGWMMDNNFSHHWKGMFPTETESTVFCLFVYLFIFVFETASGFVAQTGVHWCNLGSLQPLPPGFKRFSCLSLPSSLDYRHAPPCLANFYIFSGDRVSPCWPDWS

SEQ ID NO: 280 - protein, 129 aa, homo sapiens
MAKSLRSKWKRKMRAEKRKKNAPKEASRLKSILKLDGDVLMKDVQEIATVVVPKPKHCQEKMQCEVKDEKDDMKMETDIKRNKKTLLDQHGQYPIWMNQRQRKRLKAKREKRKGKSKAKAVKVAKGLAW

SEQ ID NO: 281 - protein, 106 aa, homo sapiens
MNRNILEEMLQYLLIDWIVGDQFEIQLNQQLWSLIPNNDVRRLVSHVIRTLKTDCTETHLQLACAKLISRTGLLMKLLSEQQELRTVSMTAWKPRMNRKSRSRMRS

SEQ ID NO: 282 - protein, 1247 aa, homo sapiens
MLRLVAACPESCVVCTKDVTLCHQLTYIVAAPMTTRVLIITDGYLSSIESTNLSLLFNLALLSLSRNGIEDVQEDALHGLTMLRTLLLEHNQISSSSLTDHTFSKLHSLQVLVLSNNALRTLRGSWFRNTSGLTRLQLDGNQITNLTDSSFGGTNLHSLRYLDLSNNFISYIGKDAFRPLPQLQEVDLSRNRLAHMPDVFTPLKQLILLSLDKNQWSCTCDLHPLARFLRNYIKSSAHTLRNAKDLNCQPSTAAVAAAQSVLRLSETNCDSKAPNFTLVLKDRSPLLPGPDVALLTVLGFAGAVGLTCLGLVVFNWKLHQGKANEHTSENLCCRTFDEPLCAHEARNYHTKGYCNCHLTQENEIKVMSTVGSRKEMPLLQENSHQATSASESATLDGSFRNLKKKDRGVGSTLFCQDGRLLHSECSEPPGNMRAFNEAGLLTTYNPRKVQKLWNLEPGEVQPQTLQHHIIRTEDISSDIFRRRYATPASALAGESLEKRLTNESWQPPIEKEDNGLHPHRQRHFITSSSSKPCEPEEHYVQKIVQKNRSKYDDPCGLLKQSKPRYFQPNNSLICKYVPCEQFEDYMKEKKPNRRQHSKPEKEQIQINSAIEKFLMSEDNIDLSGLSTKTKKAYSPKRVIFHDPDLVEINRSMMSPKISTPWKRQKNQSNQLTKLDVKKFSNTGERNKGEKWFTNSWVLKRKRTPQSDLKGKIKGQNLKLNLHPFRKVRVHPEKSLSSLPKQCKQVLLPPKKLSKTSETEAKINTVCSADFLQQSESSNYVRLTSKRLPLKHDSKQTPYYQRNTKRAPLLSANNLRVVNQSSIESSCYSAGHIPDGNTSKLPQPTPTDAEHRHSHSQFSTEQMEDATQLESKVLSYLATTWENTGSDVLPFQHSRRATDQGTTESTEHMGQNVSKTSELNQFSLSPRNQTQLLDAHKTDSYNKEYTLDQNEALQHREQNSSHAQLENKEKTLMTKPQISHQIVENCIMDKEENDVEKKLSKTETYDSSLIPQTQSKNNLSFMKTNSIPYQNRIELPKDISTSPVSSQAVWHLTNSSEKGIDSTNALPRNDGTEALEIKIVGKEEKNMLDESKTDSSMLTQISQMTLKGITKERQQTWENGTSEKYILHDASSAEETITAKDLSITSSHETQNRILCSEVDPEVNSNVHNFREVQNIQPDKDSAHKEGAMTVETHEALSFLPGLKDSFEAENEVFLVPSRINEAENSAPKPVLYPPSAEYATTSPLETE

SEQ ID NO: 283 - protein, 205 aa, homo sapiens
MTPPERLFLPRVCGTTLHLLLLGLLLVLLPGAQGLPGVGLTPSAAQTARQHPKMHLAHSTLKPAAHLIGDPSKQNSLLWRANTDRAFLQDGFSLSNNSLLVPTSGIYFVYSQVVFSGKAYSPKATSSPLYLAHEVQLFSSQYPFHVPLLSSQKMVYPGLQEPWLHSMYHGAAFQLTQGDQLSTHTDGIPHLVLSPSTVFFGAFAL

SEQ ID NO: 284 - protein, 88 aa, homo sapiens
MASSDVKPKSVSHAKKWSEEIENLYRFQQAGYRDETEYRQVKQVSMVDRWPETGYVKKLQRRDNTFYYYNKQRECDDKEVHKVKIYAY

SEQ ID NO: 285 - protein, 378 aa, homo sapiens
MAGSYPEGAPAVLADKRQQFGSRFLRDPARVFHHNAWDNVEWSEEQAAAAERKVQENSIQRVCQEKQVDYEINAHKYWNDFYKIHENGFFKDRHWLFTEFPELAPSQNQNHLKDWFLENKSEVPECRNNEDGPGLIMEEQHKCSSKSLEHKTQTLPVEENVTQKISDLEICADEFPGSSATYRILEVGCGVGNTVFPILQTNNDPGLFVYCCDFSSTAIELVQTNSEYDPSRCFAFVHDLCDEEKSYPVPKGSLDIIILIFVLSAIVPDKMQKAINRLSRLLKPGGMMLLRDYGRYDMAQLRFKKGQCLSGNFYVRGDGTRVYFFTQEELDTLFTTAGLEKVQNLVDRRLQVNRGKQLTMYRVWIQCKYCKPLLSSTS

SEQ ID NO: 286 - protein, 447 aa, homo sapiens
MRFRIYKRKVLILTLVVAACGFVLWSSNGRQRKNEALAPPLLDAEPARGAGGRGGDHPSVAVGIRRVSNVSAASLVPAVPQPEADNLTLRYRSLVYQLNFDQTLRNVDKAGTWAPRELVLVVQVHNRPEYLRLLLDSLRKAQGIDNVLVIFSHDFWSTEINQLIAGVNFCPVLQVFFPFSIQLYPNEFPGSDPRDCPRDLPKNAALKLGCINAEYPDSFGHYREAKFSQTKHHWWWKLHFVWERVKILRDYAGLILFLEEDHYLAPDFYHVFKKMWKLKQQECPECDVLSLGTYSASRSFYGMADKVDVKTWKSTEHNMGLALTRNAYQKLIECTDTFCTYDDYNWDWTLQYLTVSCLPKFWKVLVPQIPRIFHAGDCGMHHKKTCRPSTQSAQIESLLNNNKQYMFPETLTISEKFTVVAISPPRKNGGWGDIRDHELCKSYRRLQ

SEQ ID NO: 287 - protein, 343 aa, homo sapiens
MWSHLNRLLFWSIFSSVTCRKAVLDCEAMKTNEFPSPCLDSKTKVVMKGQNVSMFCSHKNKSLQITYSLFRRKTHLGTQDGKGEPAIFNLSITEAHESGPYKCKAQVTSCSKYSRDFSFTIVDPVTSPVLNIMVIQTETDRHITLHCLSVNGSLPINYTFFENHVAISPAISKYDREPAEFNLTKKNPGEEEEYRCEAKNRLPNYATYSHPVTMPSTGGDSCPFCLKLLLPGLLLLLVVIILILAFWVLPKYKTRKAMRNNVPRDRGDTAMEVGIYANILEKQAKEESVPEVGSRPCVSTAQDEAKHSQELQYATPVFQEVAPREQEACDSYKSGYVYSELNF

SEQ ID NO: 288 - protein, 513 aa, homo sapiens
MKRLLLLFLFFITFSSAFPLVRMTENEENMQLAQAYLNQFYSLEIEGNHLVQSKNRSLIDDKIREMQAFFGLTVTGKLDSNTLEIMKTPRCGVPDVGQYGYTLPGWRKYNLTYRIINYTPDMARAAVDEAIQEGLEVWSKVTPLKFTKISKGIADIMIAFRTRVHGRCPRYFDGPLGVLGHAFPPGPGLGGDTHFDEDENWTKDGAGFNLFLVAAHEFGHALGLSHSNDQTALMFPNYVSLDPRKYPLSQDDINGIQSIYGGLPKEPAKPKEPTIPHACDPDLTFDAITTFRREVMFFKGRHLWRIYYDITDVEFELIASFWPSLPADLQAAYENPRDKILVFKDENFWMIRGYAVLPDYPKSIHTLGFPGRVKKIDAAVCDKTTRKTYFFVGIWCWRFDEMTQTMDKGFPQRVVKHFPGISIRVDAAFQYKGFFFFSRGSKQFEYDIKTKNITRIMRTNTWFQCKEPKNSSFGFDINKEKAHSGGIKILYHKSLSLFIFGIVHLLKNTSIYQ

SEQ ID NO: 289 - protein, 466 aa, homo sapiens
MTLKASEGESGGSMHTALSDLYLEHLLQKRSRPEAVSHPLNTVTEDMYTNGSPAPGSPAQVKGQEVRKVRLIQFEKVTEEPMGITLKLNEKQSCTVARILHGGMIHRQGSLHVGDEILEINGTNVTNHSVDQLQKAMKETKGMISLKVIPNQQSRLPALQMFMRAQFDYDPKKDNLIPCKEAGLKFATGDIIQIINKDDSNWWQGRVEGSSKESAGLIPSPELQEWRVASMAQSAPSEAPSCSPFGKKKKYKDKYLAKHSSIFDQLDVVSYEEVVRLPAFKRKTLVLIGASGVGRSHIKNALLSQNPEKFVYPVPYTTRPPRKSEEDGKEYHFISTEEMTRNISANEFLEFGSYQGNMFGTKFETVHQIHKQNKIAILDIEPQTLKIVRTAELSPFIVFIAPTDQGTQTEALQQLQKDSEAIRSQYAHYFDLSLVNNGVDETLKKLQEAFDQACSSPQWVPVSWVY

SEQ ID NO: 290 - protein, 161 aa, homo sapiens
MAGILRLVVQWPPGRLQTVTKGVESLICTDWIRHKFTRSRIPEKVFQASPEDHEKYGGDPQNPHKLHIVTRIKSTRRRPYWEKDIIKMLGLEKAHTPQVHKNIPSVNAKLKVVKHLIRIKPLKLPQGLPAEENMSNTCLKSTGELVVQWHLKPVEQKAHES

SEQ ID NO: 291 - protein, 546 aa, homo sapiens
MTPLVSRLSRLWAIMRKPRAAVGSGHRKQAASQEGRQKHAKNNSQAKPSACDGMIAECPGAPAGLARQPEEVVLQASVSSYHLFRDVAEVTAFRGSLLSWYDQEKRDLPWRRRAEDEMDLDRRAYAVWVSEVMLQQTQVATVINYYTGWMQKWPTLQDLASASLEEVNQLWAGLGYYSRGRRLQEGARKVVEELGGHMPRTAETLQQLLPGVGRYTAGAIASIAFGQATGVVDGNVARVLCRVRAIGADPSSTLVSQQLWGLAQQLVDPARPGDFNQAAMELGATVCTPQRPLCSQCPVESLCRARQRVEQEQLLASGSLSGSPDVEECAPNTGQCHLCLPPSEPWDQTLGVVNFPRKASRKPPREESSATCVLEQPGALGAQILLVQRPNSGLLAGLWEFPSVTWEPSEQLQRKALLQELQRWAGPLPATHLRHLGEVVHTFSHIKLTYQVYGLALEGQTPVTTVPPGARWLTQEEFHTAAVSTAMKKVFRVYQGQQPGTCMGSKRSQVSSPCSRKKPRMGQQVLDNFFRSHISTDAHSLNSAAQ

SEQ ID NO: 292 - protein, 1937 aa, homo sapiens
MSASSDAEMAVFGEAAPYLRKSEKERIEAQNKPFDAKTSVFVAEPKESYVKSTIQSKEGGKVTVKTEGGATLTVREDQVFPMNPPKYDKIEDMAMMTHLHEPGVLYNLKERYAAWMIYTYSGLFCVTVNPYKWLPVYKPEVVAAYRGKKRQEAPPHIFSISDNAYQFMLTDRENQSILITGESGAGKTVNTKRVIQYFATIAVTGEKKKDESGKMQGTLEDQIISANPLLEAFGNAKTVRNDNSSRFGKFIRIHFGTTGKLASADIETYLLEKSRVTFQLKAERSYHIFYQITSNKKPDLIEMLLITTNPYDYAFVSQGEITVPSIDDQEELMATDSAIDILGFTPEEKVSIYKLTGAVMHYGNMKFKQKQREEQAEPDGTEVADKAAYLQSLNSADLLKALCYPRVKVGNEYVTKGQTVQQVYNAVGALAKAVYEKMFLWMVTRINQQLDTKQPRQYFIGVLDIAGFEIFDFNSLEQLCINFTNEKLQQFFNHHMFVLEQEEYKKEGIEWTFIDFGMDLAACIELIEKPLGIFSILEEECMFPKATDTSFKNKLYDQHLGKSANFQKPKVVKGKAEAHFSLIHYAGTVDYNITGWLDKNKDPLNDTVVGLYQKSAMKTLASLFSTYASAEADSSAKKGAKKKGSSFQTVSALFRENLNKLMTNLRSTHPHFVRCIIPNETKTPGAMEHELVLHQLRCNGVLEGIRICRKGFPSRILYGDFKQRYKVLNASAIPEGQFIDSKKASEKLLASIDIDHTQYKFGHTKVFFKAGLLGLLEEMRDEKLAQIITRTQAVCRGFLMRVEYQKMLQRREALFCIQYNVRAFMNVKHWPWMKLFFKIKPLLKSAETEKEMATMKEEFQKTKDELAKSEAKRKELEEKMVTLLKEKNDLQLQVQSEADSLADAEERCEQLIKNKIQLEAKIKEVTERAEEEEEINAELTAKKRKLEDECSELKKDIDDLELTLAKVEKEKHATENKVKNLTEEMAGLDETIAKLSKEKKALQETHQQTLDDLQAEEDKVNILTKAKTKLEQQVDDLEGSLEQEKKLRMDLERAKRKLEGDLKLAQESTMDMENDKQQLDEKLEKKEFEISNLISKIEDEQAVEIQLQKKIKELQARIEELGEEIEAERASRAKAEKQRSDLSRELEEISERLEEAGGATSAQVELNKKREAEFQKLRRDLEEATLQHEAMVAALRKKHADSMAELGEQIDNLQRVKQKLEKEKSELKMETDDLSSNAEAISKAKGNLEKMCRSLEDQVSELKTKEEEQQRLINDLTAQRARLQTEAGEYSRQLDEKDALVSQLSRSKQASTQQIEELKHQLEEETKAKNALAHALQSSRHDCDLLREQYEEEQEGKAELQRALSKANSEVAQWRTKYETDAIQRTEELEEAKKKLAQRLQEAEEHVEAVNAKCASLEKTKQRLQNEVEDLMLDVERSNAACAALDKKQRNFDKVLSEWKQKYEETQAELEASQKESRSLSTELFKVKNVYEESLDQLETLRRENKNLQQEISDLTEQIAEGGKQIHELEKIKKQVEQEKCEIQAALEEAEASLEHEEGKILRIQLELNQVKSEVDRKIAEKDEEIDQLKRNHTRVVETMQSTLDAEIRSRNDALRVKKKMEGDLNEMEIQLNHANRLAAESLRNYRNTQGILKETQLHLDDALRGQEDLKEQLAIVERRANLLQAEIEELWATLEQTERSRKIAEQELLDASERVQLLHTQNTSLINTKKKLENDVSQLQSEVEEVIQESRNAEEKAKKAITDAAMMAEELKKEQDTSAHLERMKKNLEQTVKDLQHRLDEAEQLALKGGKKQIQKLEARVRELEGEVENEQKRNAEAVKGLRKHERRVKELTYQTEEDRKNVLRLQDLVDKLQAKVKSYKRQAEEAEEQSNANLSKFRKLQHELEEAEERADIAESQVNKLRVKSREVHTKISAE

SEQ ID NO: 293 - protein, 174 aa, homo sapiens [sequence omitted]

SEQ ID NO: 294 - protein, 916 aa, homo sapiens
MSYTLDSLGNPSAYRRVTETRSSFSRVSGSPSSGFRSQSWSRGSPSTVSSSYKRSMLAPRLAYSSAMLSSAESSLDFSQSSSLLNGGSGPGGDYKLSRSNEKEQLQGLNDRFAGYIEKVHYLEQQNKEIEAEIQALRQKQASHAQLGDAYDQEIRELRATLEMVNHEKAQVQLDSDHLEEDIHRLKERFEEEARLRDDTEAAIRALRKDIEEASLVKVELDKKVQSLQDEVAFLRSNHEEEVADLLAQIQASHITVERKDYLKTDISTALKEIRSQLESHSDQNMHQAEEWFKCRYAKLTEAAEQNKEAIRSAKEEIAEYRRQLQSKSIELESVRGTKESLERQLSDIEERHNHDLSSYQDTIQQLENELRGTKWEMARHLREYQDLLNVKMALDIEIAAYRKLLEGEETRFSTFAGSITGPLYTHRPPITISSKIQKPKVEAPKLKVQHKFVEEIIEETKVEDEKSEMEEALTAITEELAVSMKEEKKEAAEEKEEEPEAEEEEVAAKKSPVKATAPEVKEEEGEKEEEEGQEEEEEEDEGAKSDQAEEGGSEKEGSSEKEEGEQEEGETEAEAEGEEAEAKEEKKVEEKSEEVATKEELVADAKVEKPEKAKSPVPKSPVEEKGKSPVPKSPVEEKGKSPVPKSPVEEKGKSPVPKSPVEEKGKSPVSKSPVEEKAKSPVPKSPVEEAKSKAEVGKGEQKEEEEKEVKEAPKEEKVEKKEEKPKDVPEKKKAESPVKEEAVAEVVTITKSVKVHLEKETKEEGKPLQQEKEKEKAGGEGGSEEEGSDKGAKGSRKEDIAVNGEVEGKEEVEQETKEKGSGREEEKGVVTNGLDLSPADEKKGGDKSEEKVVVTKTVEKITSEGGDGATKYITKSVTVTQKVEEHEETFEEKLVSTKKVEKVTSHAIVKEVTQSD

SEQ ID NO: 295 - protein, 356 aa, homo sapiens
MTKSYSESGLMGEPQPQGPPSWTDECLSSQDEEHEADKKEDDLETMNAEEDSLRNGGEEEDEDEDLEEEEEEEEEDDDQKPKRRGPKKKKMTKARLERFKLRRMKANARERNRMHGLNAALDNLRKVVPCYSKTQKLSKIETLRLAKNYIWALSEILRSGKSPDLVSFVQTLCKGLSQPTTNLVAGCLQLNPRTFLPEQNQDMPPHLPTASASFPVHPYSYQSPGLPSPPYGTMDSSHVFHVKPPPHAYSAALEPFFESPLTDCTSPSFDGPLSPPLSINGNFSFKHEPSAEFEKNYAFTMHYPAATLAGAQSHGSIFSGTAAPRCEIPIDNIMSFDSHSHHERVMSAQLNAIFHD

SEQ ID NO: 296 - protein, 471 aa, homo sapiens
MQSNKTFNLEKQNHTPRKHHQHHHQQQHHQQQQQQPPPPPIPANGQQASSQNEGLTIDLKNFRKPGEKTFTQRSRLFVGNLPPDITEEEMRKLFEKYGKAGEVFIHKDKGFGFIRLETRTLAEIAKVELDNMPLRGKQLRVRFACHSASLTVRNLPQYVSNELLEEAFSVFGQVERAVVIVDDRGRPSGKGIVEFSGKPAARKALDRCSEGSFLLTTFPRPVTVEPMDQLDDEEGLPEKLVIKNQQFHKEREQPPRFAQPGSFEYEYAMRWKALIEMEKQQQDQVDRNIKEAREKLEMEMEAARHEHQVMLMRQDLMRRQEELRRMEELHNQEVQKRKQLELRQEEERRRREEEMRRQQEEMMRRQQEGFKGTFPDAREQEIRMGQMAMGGAMGINNRGAMPPAPVPAGTPAPPGPATMMPDGTLGLTPPTTERFGQAATMEGIGAIGGTPPAFNRAAPGAEFAPNKRRRY

SEQ ID NO: 297 - protein, 106 aa, homo sapiens
MPTVKTRKLNSLELTYLAQGHTMSEWGNLDMDFSLPELRADQRLCLNFQDPFLPLVDAHGIEKCRAFSFSVEKFCLPLVMKGILQKGVSPLNSSIDYGRLAKKESL

SEQ ID NO: 298 - protein, 445 aa, homo sapiens
MDLELDEYYNKTLATENNTAATRNSDFPVWDDYKSSVDDLQYFLIGLYTFVSLLGFMGNLLILMALMKKRNQKTTVNFLIGNLAFSDILVVLFCSPFTLTSVLLDQWMFGKVMCHIMPFLQCVSVLVSTLILISIAIVRYHMIKHPISNNLTANHGYFLIATVWTLGFAICSPLPVFHSLVELQETFGSALLSSRYLCVESWPSDSYRIAFTISLLLVQYILPLVCLTVSHTSVCRSISCGLSNKENRLEENEMINLTLHPSKKSGPQVKLSGSHKWSYSFIKKHRRRYSKKTACVLPAPERPSQENHSRILPENFGSVRSQLSSSSKFIPGVPTCFEIKPEENSDVHELRVKRSVTRIKKRSRSVFYRLTILILVFAVSWMPLHLFHVVTDFNDNLISNRHFKLVYCICHLLGMMSCCLNPILYGFLNNGIKADLVSLIHCLHM

SEQ ID NO: 299 - protein, 109 aa, homo sapiens
MSITDVLSADDIAAALQECRDPDTFEPQKFFQTSGLSKMSANQVKDVFRFIDNDQSGYLDEEELKFFLQKFESGARELTESETKSLMAAADNDGDGKIGAEEFQEMVHS

SEQ ID NO: 300 - protein, 109 aa, homo sapiens
MSITDVLSADDIAAALQECQDPDTFEPQKFFQTSGLSKMSASQVKDVFRFIDNDQSGYLDEEELKFFLQKFESGARELTESETKSLMAAADNDGDGKIGAEEFQEMVHS

SEQ ID NO: 301 - protein, 303 aa, homo sapiens
MSFSSLPTEIQSLLFLTFLTIYLVTLMGNCLIILVTLADPMLHSPMYFFLRNLSFLEIGFNLVIVPKMLGTLLAQDTTISFLGCATQMYFFFFFGVAECFLLATMAYDRYVAICSPLHYPVIMNQRTRAKLAAASWFPGFPVATVQTTWLFSFPFCGTNKVNHFFCDSPPVLRLVCADTALFEIYAIVGTILVVMIPCLLILCSYTHIAAAILKIPSAKGKNKAFSTCSSHLLVVSLFYISLSLTYFRPKSNNSPEGKKLLSLSYTVMTPMLNPIIYSLRNNEVKNALSRTVSKALALRNCIP

SEQ ID NO: 302 - protein, 310 aa, homo sapiens
MESNQTWITEVILLGFQVDPALELFLFGFFLLFYSLTLMGNGIILGLIYLDSRLHTPMYVFLSHLAIVDMSYASSTVPKMLANLVMHKKVISFAPCILQTFLYLAFAITECLILVMMCYDRYVAICHPLQYTLIMNWRVCTVLASTCWIFSFLLALVHITLILRLPFCGPQKINHFFCQIMSVFKLACADTRLNQVVLFAGSAFILVGPLCLVLVSYLHILVAILRIQSGEGRRKAFSTCSSHLCVVGLFFGSAIVMYMAPKSSHSQERRKILSLFYSLFNPILNPLIYSLRNAEVKGALKRVLWKQRSM

SEQ ID NO: 303 - protein, 330 aa, homo sapiens
MCSFFLCQTGKQAKISMGEENQTFVSKFIFLGLSQDLQTQILLFILFLIIYLLTVLGNQLIIILIFLDSRLHTPMYFFLRNLSFADLCFSTSIVPQVLVHFLVKRKTISFYGCMTQIIVFLLVGCTECALLAVMSYDRYVAVCKPLYYSTIMTQRVCLWLSFRSWASGALVSLVDTSFTFHLPYWGQNIINHYFCEPPALLKLASIDTYSTEMAIFSMGVVILLAPVSLILGSYWNIISTVIQMQSGEGRLKAFSTCGSHLIVVVLFYGSGIFTYMRPNSKTTKELDKMISVFYTAVTPMLNPIIYSLRNKDVKGALRKLVGRKCFSHRQ

SEQ ID NO: 304 - protein, 312 aa, homo sapiens
MARENSTFNSDFILLGIFNHSPTHTFLFFLVLAIFSVAFMGNSVMVLLIYLDTQLHTPMYLLLSQLSLMDLMLICTTVPKMAFNYLSGSKSISMAGCATQIFFYTSLLGSECFLLAVMAYDRYTAICHPLRYTNLMSPKICGLMTAFSWILGSTDGIIDVVATFSFSYCGSREIAHFFCDFPSLLILSCSDTSIFEKILFICCIVMIVFPVAIIIASYARVILAVIHMGSGEGRRKAFTTCSSHLLVVGMYYGAALFMYIRPTSDRSPTQDKMVSVFYTILTPMLNPLIYSLRNKEVTRAFMKILGKGKSGE

SEQ ID NO: 305 - protein, 324 aa, homo sapiens
MGMEGLLQNSTNFVLTGLITHPAFPGLLFAIVFSIFVVAITANLVMILLIHMDSRLHTPMYFLLSQLSIMDTIYICITVPKMLQDLLSKDKTISFLGCAVQIFLYLTLIGGEFFLLGLMAYDRYVAVCNPLRYPLLMNRRVCLFMVVGSWVGGSLDGFMLTPVTMSFPFCRSREINHFFCEIPAVLKLSCTDTSLYETLMYACCVLMLLIPLSVISVSYTHILLTVHRMNSAEGRRKAFATCSSHIMVVSVFYGAAFYTNVLPHSYHTPEKDKVVSAFYTILTPMLNPLIYSLRNKDVAAALRKVLGRCGSSQSIRVATVIRKG

SEQ ID NO: 306 - protein, 323 aa, homo sapiens
MGMEGLLQNSTNFVLTGLITHPAFPGLLFAVVFSIFVVAITANLVMILLIHMDSRLHTPMYFLLSQLSIMDTIYICITVPKMLQDLLSKDKTISFLGCAVQIFYLTLIGGEFFLLGLMAYDRYVAVCNPLRYPLLMNRRVCLFMVVGSWVGGSLDGFMLTPVTMSFPFCRSREINHFFCEIPAVLKLSCTDTSLYETLMYACCVLMLLIPLSVISVSYTHILLTVHRMNSAEGRRKAFATCSSHIMVVSVFYGAAFYTNVLPHSYHTPEKDKVVSAFYTILTPMLNPLIYSLRNKDVAAALRKVLGRCGSSQSIRVATVIRKG

SEQ ID NO: 307 - protein, 311 aa, homo sapiens
MEMENCTRVKEFIFLGLTQNREVSLVLFLFLLLVYVTTLLGNLLIMVTVTCESRLHTPMYFLLHNLSIADICFSSITVPKVLVDLLSERKTISFNHCFTQMFLFHLIGGVDVFSLSVMALDRYVAISKPLHYATIMSRDHCIGLTVAAWLGGFVHSIVQISLLLPLPFCGPNVLDTFYCDVHRVLKLAHTDIFILELLMISNNGLLTTLWFFLLLVSYIVILSLPKSQAGEGRRKAISTCTSHITVVTLHFVPCIYVYARPFTALPMDKAISVTFTVISPLLNPLIYTLRNHEMKSAMRRLKRRLVPSDRK

SEQ ID NO: 308 - protein, 307 aa, homo sapiens
METGNLTWVSDFVFLGLSQTRELQRFLFLMFLFVYITTVMGNILIIITVTSDSQLHTPMYFLLRNLAVLDLCFSSVTAPKMLVDLLSEKKTISYQGCMGQIFFFHFLGGAMVFFLSVMAFDRLIAISRPLRYVTVMNTQLWVGLVVATWVGGFVHSIVQLALMLPLPFCGPNILDNFYCDVPQVLRLACTDTSLLEFLKISNSGLLDVVWFFLLLMSYLFILVMLRSHPGEARRKAASTCTTHIIVVSMIFVPSIYLYARPFTPFPMDKLVSIGHTVMTPMLNPMIYTLRNQDMQAAVRRLGRHRLV

SEQ ID NO: 309 - protein, 312 aa, homo sapiens
MADDNFTVVTEFILLGLTDHAELKAVLFVVFLVIYAITLLRNLGMILLIQITSKLHTPMYFLLSCLSFVDACYSSAIAPKMLVNLLVVKATISFSACMVQHLCFGVFITTEGFLLSVMAYDRYVAIVSPLLYTVAMSDRKCVELVTGSWIGGIVNTLIHTISLRRLSFCRLNAVSHFFCDIPSLLKLSCSDTSMNELLLLTFSGVIAMATFLTVIISYIFIAFASLRIHSASGRQQAFSTCASHLTAVTIFYGTLIFSYIQPSSQYFVEQEKVVSMFYTLGIPMLNLLIHSLRNKDVKEAVKRAIEMKHFLC

SEQ ID NO: 310 - protein, 315 aa, homo sapiens
MLSPNHTIVTEFILLGLTDDPVLEKILFGVFLAIYLITLAGNLCMILLIRTNSQLQTPMYFFLGHLSFVDICYSSNVTPNMLHNFLSEQKTISYAGCFTQCLLFIALVITEFYFLASMALDRYVAICSPLHYSSRMSKNICISLVTVPYMYGFLNGLSQTLLTFHLSFCGSLEINHFYCADPPLIMLACSDTRVKKMAMFVVAGFTLSSSLFIILLSYLFIFAAIFRIRSAEGRHKAFSTCASHLTIVTLFYGTLFCMYVRPPSEKSVEESKIIAVFYTFLSPMLNPLIYSLRNRDVILAIQQMIRGKSFCKIAV

SEQ ID NO: 311 - protein, 312 aa, homo sapiens
MMGRRNDTNVADFILTGLSDSEEVQMALFMLFLLIYLITMLGNVGMLLIIRLDLQLHTPMYFFLTHLSFIDLSYSTVVTPKTLANLLTSNYISFTGCFAQMFCFVFLGTAECYLLSSMAYDRYAAICSPLHYTVIMPKRLCLALITGPYVIGFMDSFVNVVSMSRLHFCDSNIIHHFFCDTSPILALSCTDTDNTEMLIFIIAGSTLMVSLITISASYVSILSTILKINSTSGKQKAFSTCVSHLLGVTIFYGTMIFTYLKPRKSYSLGRDQVAPVFYTIVIPMLNPLIYSLRNREVKNALIRVMQRRQDSR

SEQ ID NO: 312 - protein, 305 aa, homo sapiens
MQRSNHTVTEFILLGFTTDPGMQLGLFVVFLGVYSLTVVGNSTLIVLICNDSCLHTPMYFFTGNLSFLDLWYSSVYTPKILVTCISEDKSISFAGCLCQFFFSAGLAYSECYLLAAVAYDRYVAISKPLLYAQAMSIKLCALLVAVSYCGGFINSSIITKKTFSFNFCRENIIDDFFCDLLPLVELACGEKGGYKIMMYFLLASNVICPAVLILASYLFIITSVLRISSSKGYLKAFSTCSSHLTSVTLYYGSILYIYALPRSSYSFDMDKIVSTFYTVVFPMLNLMIYSLRNKDVKEALKKLLP

SEQ ID NO: 313 - protein, 201 aa, homo sapiens
MALSWVLTVLSLLPLLEAQIPLCANLVPVPITNATLDRITGKWFYIASAFRNEEYNKSVQEIQATFFYFTPNKTEDTIFLREYQTRQNQCFYNSSYLNVQRENGTVSRYEGGREHVAHLLFLRDTKTLMFGSYLDDEKNWGLSFYADKPETTKEQLGEFYEALDCLCIPRSDVMYTDWKKDKCEPLEKQHEKERKQEEGES

SEQ ID NO: 314 - protein, 2925 aa, homo sapiens
MGVLASALCWLLCVWLPWGEQAAESLRVQRLGERVVDSGRSGARGMRNVKGMRNGPAQTRVSSSSSHQEATLAMGDKATVVGGQQAEAPDSVAMSSWERRLHRAKCAPSYLFSCFNGGECVHPAFCDCRRFNATGPRCQMVYNAGPERDSICRAWGQHHVETFDGLYYYLSGKGSYTLVGRHEPEGQSFSIQVHNDPQCGSSPYTCSRAVSLFFVGEQEIHLAKEVTHGGMRVQLPHVMGSARLQQLAGYVIVRHQSAFTLAWDGASAVYIKMSPELLGWTHGLCGNNNADPKDDLVTSSGKLTDDVVEFVHSWQEQAPNQPPGPTTSSLPRPPCLQQNPGTMQGVYEQCEALLRPPFDACHAYVSPLPFTASCTSDLCQSMGDVATWCRALAEYARACAQAGRPLQGWRTQLRQCTVHCKEKAFTYNECIACCPASCHPRASCVDSEIACVDGCYCPNGLIFEDGGCVAPAECPCEFHGTLYPPGSVVKEDCNTCTCTSGKWECSTAVCPAECSVTGDIHFTTFDGRRYTFPATCQYILAKSRSSGTFTVTLQNAPCGLNQDGACVQSVSVILHQDPRRQVTLTQAGDVLLFDQYKIIPPYTDDAFEIRRLSSVFLRVRTNVGVRVLYDREGLRLYLQVDQRWVEDTVGLCGTFNGNTQDDFLSPVGVPESTPQLFGNSWKTLSACSPLVSGSPLDPCDVHLQAASYSVQACSVLTGEMFAPCSAFLSPVPYFEQCRRDACRCGQPCLCATLAHYAHLCRRHGLPVDFRARLPACALSCEASKEYSPCVAPCGRTCQDLASPEACGVDGGDDLSRDECVEGCACPPDTYLDTQADLCVPRNQCSCHFQGVDYPPGDSDIPSLGHCHCKDGVMSCDSRAPAAACPAGQVFVNCSDLHTDLELSRERTCEQQLLNLSVSARGPCLSGCACPQGLLRHGDACFLPEECPCTWKGKEYFPGDQVMSPCHTCVCQRGSFQCTLHPCASTCTAYGDRHYRTFDGLPFDFVGACKVHLVKSTSDVSFSVIVENVNCYSSGMICRKFISINVGNSLIVFDDDSGNPSPESFLDDKQEVHTWRVGFFTLVHFPQEHITLLWDQRTTVHVQAGPQWQGQLAGLCGNFDLKTINEMRTPENLELTNPQEFGSSWAAVECPDTLDPRDMCVLNPLREPFAKKECSILLSEVFEICHPVVDVTWFYSNCLTDTCGCSQGGDCECFCASVSAYAHQCCQHGVAVDWRTPRLCPYDCDFFNKVLGKGPYQLSSLAAGGALVGMKAVGDDIVLVRTEDVAPADIVSFLLTAALYKAKAHDPDVVSLEAADRPNFFLHVTANGSLELAKWQGRDTFQQHASFLLHRGTRQAGLVALESLAKPSSFLYVSGAVLALRLYEHTEVFRRGTLFRLLDAKPSGAAYPICEWRYDACASPCFQTCRDPRAASCRDVPRVEGCVPVCPTPQVLDEVTQRCVYLEDCVEPAVWVPTEALGNETLPPSQGLPTPSDEEPQLSQESPRTPTHRPALTPAAPLTTALNPPVTATEEPVVSPGPTQTTLQQPLELTASQLPAGPTESPASKGVTASLLAIPHTPESSSLPVALQTPTPGMVSGAMETTRVTVIFAGSPNITVSSRSPPAPRFPLMTKAVTVRGHGSLPVRTTPPQPSLTASPSSRPVASPGAISRSPTSSGSHKAVLTPAVTKVISRTGVPQPTQAQSASSPSTPLTVAGTAAEQVPVSPLATRSLEIVLSTEKGEAGHSQPMGSPASPQPHPLPSAPPRPAQHTTMATRSPALPPETPAAASLSTATDGLAATPFMSLESTRPSQLLSGLPPDTSLPLAKVGTSAPVATPGPKASVITTPLQPQATTLPAQTLSPVLPFTPAAMTQAHPPTHIAPPAAGTAPGLLLGATLPTSGVLPVAEGTASMVSVVPRKSTTGKVAILSKQVSLPTSMYGSAEGGPTELTPATSHPLTPLVAEPEGAQAGTALPVPTSYALSRVSARTAPQDSMLVLLPQLAEAHGTSAGPHLAAEPVDEATTEPSGRSAPALSIVEGLAEALATTTEANTSTTCVPIAEQDCVRHICLEGQLIRVNQSQHCPQGAAPPRCGILGLAVRVGGDRCCPLWECACRCSIFPDLSFVTFDGSHVALFKEAIYILSQSPDEMLTVHVLDCKSANLGHLNWPPFCLVMLNMTHLAHQVTIDRFNRKVTVDLQPVWPPVSRYGFRIEDTGHMYMILTPSDIQIQWLHSSGLMIVEASKTSKAQGHGLCGICDGDAANDLTLKDGSVVGGAEDPAPFLDSWQVPSSLTSVGQTRFRPDSCATTDCSPCLRMVSNRTFSACHRFVPPESFCELWIRDTKYVQQPCVALTVYVAMCHKFHVCIEWRRSDYCPFLCSSDSTYQACVTACEPPKTCQDGILGPLDPEHCQVLGEGCVCSEGTILHRRHSALCIPEAKCACTDSMGVPRALGETWNSSLSGCCQHQCQAPDTIVPVDLGCPSPRPESCLRFGEVALLLPTKDPCCLGTVCVCNQTLCEGLAPTCRPGHRLLTHFQEDSCCPSYSCECDPDLCEAELVPSCRQDQILITGRLGDSCCTSYFCACGDCPDSIPECQEGEALTVHRNTTELCCPLYQCVCENFRCPQVQCGLGTALVEVWSPDRCCPYKSCECDCDTIPVPRCHLWEKSQLDEEFMHSVENVCGCAKYECVKAPVCLSRELGVMQPGQTVVELSADGVCHTSRCTTVLDPLTNFYQINTTSVLCDIHCEANQEYEHPRDLAACCGSCRNVSCLFTFPNGTTSLFLPGASWIADCARHHCSSTPLGAVLVRSPISCPPLNETECAKVGGSVVPSLEGCCRTCKEDGRSCKKVTIRMTIRKNECRSSTPVNLVSCDGRCPSASIYNYNINTYARFCKCCREVGLQRRSVQLFCATNATWVPYTVQEPTDCACQWS

SEQ ID NO: 315 - protein, 111 aa, homo sapiens
MSEHVRTRSQSSERGNDQESSQPVGSVIVQEPTEEKRQEEEPPTDNQGIAPSGEIENEGAPAVQGPDMEAFQQELALLKIEDEPGDGPDVREGIMPTFDLTKVLEAGDAQP

SEQ ID NO: 316 - protein, 500 aa, homo sapiens
MATVIPGDLSEVRDTQKVPSGKRKRGETKPRKNFPCQLCDKAFNSVEKLKVHSYSHTGERPYKCIQQDCTKAFVSKYKLQRHMATHSPEKTHKCNYCEKMFHRKDHLKNHLHTHDPNKETFKCEECGKNYNTKLGFKRHLALHAATSGDLTCKVCLQTFESTGVLLEHLKSHAGKSSGGVKEKKHQCEHCDRRFYTRKDVRRHMVVHTGRKDFLCQYCAQRFGRKDHLTRHMKKSHNQELLKVKTEPVDFLDPFTCNVSVPIKDELLPVMSLPSSELLSKPFTNTLQLNLYNTPFQSMQSSGSAHQMITTLPLGMTCPIDMDTVHPSHHLSFKYPFSSTSYAISIPEKEQPLKGEIESYLMELQGGVPSSSQDSQASSSSKLGLDPQIGSLDDGAGDLSLSKSSISISDPLNTPALDFSQLFNFIPLNGPPYNPLSVGSLGMSYSQEEAHSSVSQLPPQTQDLQDPANTIGLGSLHSLSAAFTSSLSTSTTLPRFHQAFQ

SEQ ID NO: 317 - protein, 167 aa, homo sapiens
SSEMFSEFDKRYTHGRGFITKAINSCHTSSLATPEDKEQAQQMNQKDFLSLIVSILRSWNEPLYHLVTEVRGMQEAPEAILSKAVEIEEQTKRLLEGMELIVSQVHPETKENEIYPVWSGLPSLQMADEESRLSAYYNLLHCLRRDSHKIDNYLKLLKCRIIHNNNC

SEQ ID NO: 318 - protein, 2335 aa, homo sapiens
MAGVFPYRGPGNPVPGPLAPLPDYMSEEKLQEKARKWQQLQAKRYAEKRKFGFVDAQKEDMPPEHVRKIIRDHGDMTNRKFRHDKRVYLGALKYMPHAVLKLLENMPMPWEQIRDVPVLYHITGAISFVNEIPWVIEPVYISQWGSMWIMMRREKRDRRHFKRMRFPPFDDEEPPLDYADNILDVEPLEAIQLELDPEEDAPVLDWFYDHQPLRDSRKYVNGSTYQRWQFTLPMMSTLYRLANQLLTDLVDDNYFYLFDLKAFFTSKALNMAIPGGPKFEPLVRDINLQDEDWNEFNDINKIIIRQPIRTEYKIAFPYLYNNLPHHVHLTWYHTPNVVFIKTEDPDLPAFYFDPLINPISHRHSVKSQEPLPDDDEEFELPEFVEPFLKDTPLYTDNTANGIALLWAPRPFNLRSGRTRRALDIPLVKNWYREHCPAGQPVKVRVSYQKLLKYYVLNALKHRPPKAQKKRYLFRSFKATKFFQSTKLDWVEVGLQVCRQGYNMLNLLIHRKNLNYLHLDYNFNLKPVKTLTTKERKKSRFGNAFHLCREVLRLTKLVVDSHVQYRLGNVDAFQLADGLQYIFAHVGQLTGMYRYKYKLMRQIRMCKDLKHLIYYRFNTGPVGKGPGCGFWAAGWRVWLFFMRGITPLLERWLGNLLARQFEGRHSKGVAKTVTKQRVESHFDLELRAAVMHDILDMMPEGIKQNKARTILQHLSEAWRCWKANIPWKVPGLPTPIENMILRYVKAKADWWTNTAHYNRERIRRGATVDKTVCKKNLGRLTRLYLKAEQERQHNYLKDGPYITAEEAVAVYTTTVHWLESRRFSPIPFPPLSYKHDTKLLILALERLKEAYSVKSRLNQSQREELGLIEQAYDNPHEALSRIKRHLLTQRAFKEVGIEFMDLYSHLVPVYDVEPLEKITDAYLDQYLWYEADKRRLFPPWIKPADTEPPPLLVYKWCQGINNLQDVWETSEGECNVMLESRFEKMYEKIDLTLLNRLLRLIVDHNIADYMTAKNNVVINYKDMNHTNSYGIIRGLQFASFIVQYYGLVMDLLVLGLHRASEMAGPPQMPNDFLSFQDIATEAAHPIRLFCRYIDRIHIFFRFTADEARDLIQRYLTEHPDPNNENIVGYNNKKCWPRDARMRLMKHDVNLGRAVFWDIKNRLPRSVTTVQWENSFVSVYSKDNPNLLFNMCGFECRILPKCRTSYEEFTHKDGVWNLQNEVTKERTAQCFLRVDDESMQRFHNRVRQILMASGSTTFTKIVNKWNTALIGLMTYFREAVVNTQELLDLLVKCENKIQTRIKIGLNSKMPSRFPPVVFYTPKELGGLGMLSMGHVLIPQSDLRWSKQTDVGITHFRSGMSHEEDQLIPNLYRYIQPWESEFIDSQRVWAEYALKRQEAIAQNRRLTLEDLEDSWDRGIPRINTLFQKDRHTLAYDKGWRVRTDFKQYQVLKQNPFWWTHQRHDGKLWNLNNYRTDMIQALGGVEGILEHTLFKGTYFPTWEGLFWEKASGFEESMKWKKLTNAQRSGLNQIPNRRFTLWWSPTINRANVYVGFQVQLDLTGIFMHGKIPTLKISLIQIFRAHLWQKIHESIVMDLCQVFDQELDALEIETVQKETIHPRKSYKMNSSCADILLFASYKWNVSRPSLLADSKDVMDSTTTQKYWIDIQLRWGDYDSHDIERYARAKFLDYTTDNMSIYPSPTGVLIAIDLAYNLHSAYGNWFPGSKPLIQQAMAKIMKANPALYVLRERIRKGLQLYSSEPTEPYLSSQNYGELFSNQIIWFVDDTNVYRVTIHKTFEGNLTTKPINGAIFIFNPRTGQLFLKIIHTSVWAGQKRLGQLAKWKTAEEVAALIRSLPVEEQPKQIIVTRKGMLDPLEVHLLDFPNIVIKGSELQLPFQACLKVEKFGDLILKATEPQMVLFNLYDDWLKTISSYTAFSRLILILRALHVNNDRAKVILKPDKTTITEPHHIWPTLTDEEWIKVEVQLKDLILADYGKKNNVNVASLTQSEIRDIILGMEISAPSQQRQQIAEIEKQTKEQSQLTATQTRTVNKHGDEIITSTTSNYETQTFSSKTEWRVRAISAANLHLRTNHIYVSSDDIKETGYTYILPKNVLKKFICISDLRAQIAGYLYGVSPPDNPQVKEIRCIVMVPQWGTHQTVHLPGQLPQHEYLKEMEPLGWIHTQPNESPQLSPQDVTTHAKIMADNPSWDGEKTIIITCSFTPGSCTLTAYKLTPSGYEWGRQNTDKGNNPKGYLPSHYERVQMLLSDRFLGFFMVPAQSSWNYNFMGVRHDPNMKYELQLANPKEFYHEVHRPSHFLNFALLQEGEVYSADREDLYA

SEQ ID NO: 319 - protein, 114 aa, homo sapiens
MAGLALQPGTALLCYSCKAQVSNEDCLQVENCTQLGEQCWTARIRAVGLLTVISKGCSLNCVDDSQDYYVGKKNITCCDTDLCNASGAHALQPAAAILALLPALGLLLWGPGQL

SEQ ID NO: 320 - protein, 420 aa, homo sapiens
MSSPRDFRAEPVNDYEGNDSEAEDLNFRETLPSSSQENTPRSKVFENKVNSEKVKLSLRNFPHNDYEDVFEEPSESGSDPSMWTARGPFRRDRWSSEDEEAAGPSQALSPLLSDTRKIVSEGELDQLAQIRPLIFNFHEQTAIKDCLKILEEKTAAYDIMQEFMALELKNLPGEFNSGNQPSNREKNRYRDILPYDSTRVPLGKSKDYINASYIRIVNCGEEYFYIATQGPLLSTIDDFWQMVLENNSNVIAMITREIEGGIIKCYHYWPISLKKPLELKHFRVFLENYQILQYFIIRMFQVVEKSTGTSHSVKQLQFTKWPDHGTPASADSFIKYIRYARKSHLTGPMVVHCSAGIGRTGVFLCVDVVFCAIVKNCSFNIMDIVAQMREQRSGMVQTKEQYHFCYDIVLEVLRKLLTLD

SEQ ID NO: 321 - protein, 1051 aa, homo sapiens
MQATAVVETASGKGYHSNGGNLQKDKPSNPKKENLLLSSNGCDEVKLTFPDDDWNSSTLEQRANNKEISNIDKMDLLEPFFSVSQDTNTESTQFQSSELEDSTDYAFLNKTYSIPYSESKLKKESLTPLSSELDPEVQKKEEVFFNILEHQDKTVGLERIYNISDANYRESAEDTQKHDTDEDSQQEYHSAEEQEYISNHLSFDQTKALDISNPEVVELGNSGYEVKCASNVEDNRVNSGSGSIISFDSLDVYGQEESLHVSKFQNSVMLREYHDLKHEKYKEQETNSMYHTVFDGSVLRSNSPGNQESQSKSGSLSPQKVLKMKIYTENMKSQINEGKDFCGNKIVENKILLHLENPSTLPQDKALETLLQPCKDCQTSWTSVFDDSIISACGYYESLQNTADSALDFSAMLPKIAVRDNQAIEDNTSLKVAHSSTTKKTCFHNIGEMCTKSLTDAASCTVTINQTVDVSTDFRACFTTSRATSARPSVVSTSSNTEITMMNKKRPDEWQNEKQKSVACSTDWSYSEDCIDTQMAITKGSGKSLSVDSLKPNGNFLNKDFLELRKACGITDLKKHPEREFQLFKDTEKDLPSMCCQKIMQRAIKAELHLLNVHYQMCRRHCCDIYKLVMENREGLNMNLSSNSAKKELGSALLSLLGDLKVRYVTLKEKIHKGIPLEELPPLSLESKLLSTFSTFASRLMKKETHVFSEADAEQDNQRAHDVDVSSNLKKTLSQMSLSSDNSHATQNISPKKDDFKNGDINADFSQLKLGDKDCRHYQETSEDWSDAKESLTGVDVSGTQGNQVEQDTWNLDLTGEMKNVEPSQRDKGYLIHVGGLCPSVSEADLRSHFQKYQVSEISIYDSTNYRYASLAFTKNSDAKIAVKEMNGIEINGKSVNVWPVKILGEYTSPLSSKNGNRISSNNLEKSTNKQIHSEFSISRLPRTRPRQLGSEQDSEVFPSDQGVKKNCKQIESAKLLPDTPVQFIPPNTLNLRSFTKIIKRLAELHPEVSRDHIINALQEVRIRHKGFLNGLSITTIVEMTSSLLKNSASS

SEQ ID NO: 322 - protein, 496 aa, homo sapiens
MVEADHPGKLFIGGLNRETNEKMLKAVFGKHGPISEVLLIKDRTSKSRGFAFITFENPADAKNAAKDMNGKSLHGKAIKVEQAQKPSFQSGGRRRPPASSRNRSPSGSLRSARGSRGGTRGWLPSHEGHLDDGGYTPDLKMSYSRGLIPVKRGPSSRSGGPPPKKSAPSAVARSNSWMGSQGPMSQRRENYGVPPRRATISSWRNDRMSTRHDGYATNDGNHPSCQETRDYAPPSRGYAYRDNGHSNRDEHSSRGYRNHRSSRETRDYAPPSRGHAYRDYGHSRRDESYSRGYRNRRSSRETREYAPPSRGHGYRDYGHSRRHESYSRGYRNHPSSRETRDYAPPHRDYAYRDYGHSSWDEHSSRGYSYHDGYGEALGRDHSEHLSGSSYRDALQRYGTSHGAPPARGPRMSYGGSTCHAYSNTRDRYGRSWESYSSCGDFHYCDREHVCRKDQRNPPSLGRVLPDPREACGSSSYVASIVDGGESRSEKGDSSRY

SEQ ID NO: 323 - protein, 496 aa, homo sapiens
MVEADHPGKLFIGGLNRETNEKMLKAVFGKHGPISEVLLIKDRTSKSRGFAFITFENPADAKNAAKDMNGTSLHGKAIKVEQAKKPSFQSGGRRRPPASSRNRSPSGSLRSARGSSGGTRGWLPSHEGHLDDGGYTPDLKMSYSRGLIPVKRGPSSRSGGPPPKKSAPSAVARSNSWMGSQGPMSQRRENYGVPPRRATISSWRNDRMSTRHDGYATNDGNHPSCQETRDYAPPSRGYAYRDNGHSNRDEHSSRGYRNHRSSRETRDYAPPSRGHAYRDYGHSRRDESYSRGYRNHRSSRETREYAPPSRGHGYRDYGHSRRHESYSRGYRNHPSSRETRDYAPPHRDYAYRDYGHSSWDEHSSRGYSYHDGYGEALGRDHSEHLSGSSYRDALQRYGTSHGAPPARGPRMSYGGSTCHAYSNTRDRYGRSWESYSSCGDFHYCDREHVCRKDQRNPPSLGRVLPDPREAYGSSSYVASIVDGGESRSEKGDSSRY

SEQ ID NO: 324 - protein, 155 aa, homo sapiens
MRHLPYFCRGQVVRGFGRGSKQLGIPTANFPEQVVDNLPADISTGIYYGWASVGSGDVHKMVVSIGWNPYYKNTKKSMETHIMHTFKEDFYGEILNVAIVGYLRPEKNFDSLESLISAIQGDIEEAKKRLELPEHLKIKEDNFFQVSKSKIMNGH

SEQ ID NO: 325 - protein, 1639 aa, homo sapiens
MAKDSPSPLGASPKKPGCSSPAAAVLENQRRELEKLRAELEAERAGWRAERRRFAARERQLREEAERERRQLADRLRSKWEAQRSRELRQLQEEMQREREAEIRQLLRWKEAEQRQLQQLLHRERDGVVRQARELQRQLAEELVNRGHCSRPGASEVSAAQCRCRLQEVLAQLRWQTDGEQAARIRYLQAALEVERQLFLKYILAHFRGHPALSGSPDPQAVHSLEEPLPQTSSGSCHAPKPACQLGSLDSLSAEVGVRSRSLGLVSSACSSSPDGLLSTHASSLDCFAPACSRSLDSTRSLPKASKSEERPSSPDTSTPGSRRLSPPPSPLPPPPPPSAHRKLSNPRGGEGSESQPCEVLTPSPPGLGHHELIKLNWLLAKALWVLARRCYTLQAENKQLRRAGCPYQADEKVKRLKVKRAELTGLARRLADRARKLQETNLRAVSAPIPGESCAGLELCQVFARQRARDLSEQASAPLAKDKQIEELRQECHLLQARVASGPCSDLHTGRGGPCTQWLNVRDLDRLQRESQREVLRLQRQLMLQQGNGGAWPEAGGQSATCEEVRRQMLALERELDQRRRECQELGAQAAPARRRGEEAETQLQAALLKNAWLAEENGRLQAKTDWVRKVEAENSEVRGHLGRACQERDASGLIAEQLLQQAARGQDRQQQLQRDPQKALCDLHPSWKEIQALQCRPGHPPEQPWETSQMPESQVKGSRRPKFHARPEDYAVSQPNRDIQEKREASLEESPVALGESASVPQVSETVPASQPLSKKTSSQSNSSSEGSMWATVPSSPTLDRDTASEVDDLEPDSVSLALEMGGSAAPAAPKLKIFMAQYNYNPFEGPNDHPEGELPLTAGDYIYIFGDMDEDGFYEGELEDGRRGLVPSNFVEQIPDSYIPGCLPAKSPDLGPSQLPAGQDEALEEDSLLSGKAQGVVDRGLCQMVRVGSKTEVATEILDTKTEACQLGLLQSMGKQGLSRPLLGTKGVLRMAPMQLHLQNVTATSANITWVYSSHRHPHVVYLDDREHALTPAGVSCYTFQGLCPGTHYRARVEVRLPRDLLQVYWGTMSSTVTFDTLLAGPPYPPLDVLVERHASPGVLVVSWLPVTIDSAGSSNGVQVTGYAVYADGLKVCEVADATAGSTLLEFSQLQVPLTWQKVSVRTMSLCGESLDSVPAQIPEDFFMCHRWPETPPFSYTCGDPSTYRVTFPVCPQKLSLAPPSAKASPHNPGSCGEPQAKFLEAFFEEPPRRQSPVSNLGSEGECPSSGAGSQAQELAEAWEGCRKDLLFQKSPQNHRPPSVSDQPGEKENCSQHMGTSKSPAPGFIHLRTECGPRKEPCQEKAALERVLRQKQDAQGFTPPQLGASQQYASDFHNVLKEEQEALCLDLWGTERREERREPEPHSRQGQALGVKRGCQLHEPSSALCPAPSAKVIKMPRGGPQQLGTGANTPARVFVALSDYNPLVMSANLKAAEEELVFQKRQLLRVWGSQDTHDFYLSECNRQVGNIPGRLVAEMEVGTEQTDRRWRSPAQGNLPSVAHLEDFQGLTIPQGSSLVLQGNSKRLPLWTPKIMIAALDYDPGDGQMGGQGKGRLALRAGDVVMVYGPMDDQGFYYGELGGHRGLVPAHLLDHMSLHGH

SEQ ID NO: 326 - protein, 203 aa, homo sapiens
METLSQDSLLECQICFNYYSPRRRPKLLDCKHTCCSVCLQQMRTSQKDVRCPWCRGVTKLPPGFSVSQLPDDPEVLAVIAIPHTSEHTPVFIKLPSNGCYMLPLPISKERALLPGDMGCRLLPGSQQKSVTVVTIPAEQQPLQGGAPQEAVEEEQDRRGVVKSSTWSGVCTVILVACVLVFLLGIVLHNMSCISKRFTVISCG

SEQ ID NO: 327 - protein, 192 aa, homo sapiens
MASKGPSASASPENSSAGGPSGSSNGAGESGGQDSTFECNICLDTAKDAVISLCGHLFCWPCLHQWLETRPNRQVCPVCKAGISRDKVIPLYGRGSTGQQDPREKTPPRPQGQRPEPENRGGFQGFGFGDGGFQMSFGIGAFPFGIFATAFNINDGRPPPAVPGTPQYVDEQFLSRLFLFVALVIMFWLLIA

SEQ ID NO: 328 - protein, 305 aa, homo sapiens
MDLSGVKKKSLLGVKENNKKSSTRAPSPTKRKDRSDEKSKDRSKDKGATKESSEKDRGRDKTRKRRSASSGSSSTRSRSSSTSSSGSSTSTGSSSGSSSSSASSRSGSSSTSRSSSSSSSSGSPSPSRRRHDNRRRSRSKSKPPKRDEKERKRRSPSPKPTKVHIGRLTRNVTKDHIMEIFSTYGKIKMIDMPVERMHPHLSKGYAYVEFENPDEAEKALKHMDGGQIDGQEITATAVLAPWPRPPPRRFSPPRRMLPPPPMWRRSPPRMRRRSRSPRRRSPVRRRSRSPGRRRHRSRSSSNSSR

SEQ ID NO: 329 - protein, 499 aa, homo sapiens
MSLADELLADLEEAAEEEEGGSYGEEEEEPAIEDVQEETQLDLSGDSVKTIAKLWDSKMFAEIMMKIEEYISKQAKASEVMGPVEAAPEYRVIVDANNLTVEIENELNIIHKFIRDKYSKRFPELESLVPNALDYIRTVKELGNSLDKCKNNENLQQILTNATIMVVSVTASTTQGQQLSEEELERLEEACDMALELNASKHRIYEYVESRMSFIAPNLSIIIGASTAAKIMGVAGGLTNLSKMPACNIMLLGAQRKTLSGFSSTSVLPHTGYIYHSDIVQSLPPDLRRKAARLVAAKCTLAARVDSFHESTEGKVGYELKDEIERKFDKWQEPPPVKQVKPLPAPLDGQRKKRGGRRYRKMKERLGLTEIRKQANRMSFGEIEEDAYQEDLGFSLGHLGKSGSGRVRQTQVNEATKARISKTLQRTLQKQSVVYGGKSTIRDRSSGTASSVAFTPLQGLEIVNPQAAEKKVAEANQKYFSSMAEFLKVKGEKSGLMST

SEQ ID NO: 330 - protein, 378 aa, homo sapiens
MATALPPRLQPVRGNETLREHYQYVGKLAGRLKEASEGSTLTTVLFLVICSFIVLENLMVLIAIWKNNKFHNRMYFFIGNLALCDLLAGIAYKVNILMSGKKTFSLSPTVWFLREGSMFVALGASTCSLLAIAIERHLTMIKMRPYDANKRHRVFLLIGMCWLIAFTLGALPILGWNCLHNLPDCSTILPLYSKKYIAFCISIFTAILVTIVILYARIYFLVKSSSRKVANHNNSERSMALLRTVVIVVSVFIACWSPLFILFLIDVACRVQACPILFKAQWFIVLAVLNSAMNPVIYTLASKEMRRAFFRLVCNCLVRGRGARASPIQPALDPSRSKSSSSNNSSHSPKVKEDLPHTAPSSCIMDKNAALQNGIFCN

SEQ ID NO: 331 - protein, 800 aa, homo sapiens
MGSSKKHRGEKEAAGTTAAAGTGGATEQPPRHREHKKHKHRSGGSGGSGGERRKRSRERGGERGSGRRGAEAEARSSTHGRERSQAEPSERRVKREKRDDGYEAAASSKTSSGDASSLSIEETNKLRAKLGLKPLEVNAIKKEAGTKEEPVTADVINPMALRQREELREKLAAAKEKRLLNQKLGKIKTLGEDDPWLDDTAAWIERSRQLQKEKDLAEKRAKLLEEMDQEFGVSTLVEEEFGQRRQDLYSARDLQGLTVEHAIDSFREGETMILTLKDKGVLQEEEDVLVNVNLVDKERAEKNVELRKKKPDYLPYAEDESVDDLAQQKPRSILSKYDEELEGERPHSFRLEQGGTADGLRERELEEIRAKLRLQAQSLSTVGPRLASEYLTPEEMVTFKKTKRRVKKIRKKEKEVVVRADDLLPLGDQTQDGDFGSRLRGRGRRRVSEVEEEKEPVPQPLPSDDTRVENMDISDEEEGGAPPPGSPQVLEEDEAELELQKQLEKGRRLRQLQQLQQLRDSGEKVVEIVKKLESRQRGWEEDEDPERKGAIVFNATSEFCRTLGEIPTYGLAGNREEQEELMDFERDEERSANGGSESDGEENIGWSTVNLDEEKQQQDFSASSTTILDEEPIVNRGLAAALLLCQNKGLLETTVQKVARVKAPNKSLPSAVYCIEDKMAIDDKYSRREEYRGFTQDFKEKDGYKPDVKIEYVDETGRKLTPKEAFRQLSHRFHGKGSGKMKTERRMKKLDEEALLKKMSSSDTPLGTVALLQEKQKAQKTPYIVLSGSGKSMNANTITK

SEQ ID NO: 332 - protein, 687 aa, homo sapiens
MSNRNNNKLPSNLPQLQNLIKRDPPAYIEEFLQQYNHYKSNVEIFKLQPNKPSKELAELVMFMAQISHCYPEYLSNFPQEVKDLLSCNHTVLDPDLRMTFCKALILLRNKNLINPSSLLELFFELFRCHDKLLRKTLYTHIVTDIKNINAKHKNNKVNVVLQNFMYTMLRDSNATAAKMSLDVMIELYRRNIWNDAKTVNVITTACFSKVTKILVAALTFFLGKDEDEKQDSDSESEDDGPTARDLLVQYATGKKSSKNKKKLEKAMKVLKKQKKKKKPEVFNFSAIHLIHDPQDFAEKLLKQLECCKERFEVKMMLMNLISRLVGIHELFLFNFYPFLQRFLQPHQREVTKILLFAAQASHHLVPPEIIQSLLMTVANNFVTDKNSGEVMTVGINAIKEITARCPLAMTEELLQDLAQYKTHKDKNVMMSARTLIHLFRTLNPQMLQKKFRGKPTEASIEARVQEYGELDAKDYIPGAEVLEVEKEENAENDEDGWESTSLSEEEDADGEWIDVQHSSDEEQQEISKKLNSMPMEERKAKAAAISTSRVLTQEDFQKIRMAQMRKELDAAPGKSQKRKYIEIDSDEEPRGELLSLRDIERLHKKPKSDKETRLATAMAGKTDRKEFVRKKTKTNPFSSSTNKEKKKQKNFMMMRYSQNVRSKNKRSFREKQLALRDALLKKRKRMK

SEQ ID NO: 333 - protein, 371 aa, homo sapiens
MWRSLGLALALCLLPSGGTESQDQSSLCKQPPAWSIRDQDPMLNSNGSVTVVALLQASYLCILQASKLEDLRVKLKKEGYSNISYIVVNHQGISSRLKYTHLKNKVSEHIPVYQQEENQTDVWTLLNGSKDDFLIYDRCGRLVYHLGLPFSFLTFPYVEEAIKIAYCEKKCGNCSLTTLKDEDFCKRVSLATVDKTVETPSPHYHHEHHHNHGHQHLGSSELSENQQPGAPNAPTHPAPPGLHHHHKHKGQHRQGHPENRDMPASEDLQDLQKKLCRKRCINQLLCKLPTDSELAPRSCCHCRHLIFEKTGSAITQCKENLPSLCSQGLRAEENITESCQRLPPAAQISQQLIPTEASASRKNQAKKEPSN

SEQ ID NO: 334 - protein, 299 aa, homo sapiens
MPGRLLRGLWQRWRRYKYRFVPWIALNLSHNPRTLRYVPEESKDKVISDEDVLGTLLKVFQALFLNDFNKQSEILSMLPESVKSKYQDLLAVEHQGVKLLENRHQQQSTFKPEEILYKTLGFSVAQATSSLISAGKGVFVTKGLVPKGAVVSMYPGTVYQKYEPIFFQSIGNPFIFRCLDGVLIDGNDKGISKVVYRSCNGRDRLGPLKMSDSTWLTSEIHNPLAVGQYVNNCSNDRAANVCYQEFDVPAVFPIELKQYLPNIAYSYDKQSPLRCVVLVALRDINQGEELFSNYYTIVS

SEQ ID NO: 335 - protein, 396 aa, homo sapiens
MLPLLLLPLLWGGSLQEKPVYELQVQKSVTVQEGLCVLVPCSFSYPWRSWYSSPPLYVYWFRDGEIPYYAEVVATNNPDRRVKPETQGRFRLLGDVQKKNCSLSIGDARMEDTGSYFFRVERGRDVKYSYQQNKLNLEVTALIEKPDIHFLEPLESGRPTRLSCSLPGSCEAGPPLTFSWTGNALSPLDPETTRSSELTLTPRPEDHGTNLTCQVKRQGAQVTTERTVQLNVSYAPQNLAISIFFRNGTGTALRILSNGMSVPIQEGQSLFLACTVDSNPPASLSWFREGKALNPSQTSMSGTLELPNIGAREGGEFTCRVQHPLGSQHLSFILSVQRSSSSCICVTEKQQGSWPLVLTLIRGALMGAGFLLTYGLTWIYYTRCGGPQQSRAERPG

SEQ ID NO: 336 - protein, 359 aa, homo sapiens
MQAAALPEEIRWLLEDAEEFLAEGLRNENLSAVARDHRDHILRGFQQIKARYYWDFQPQGGDIGQDSSDDNHSGTLGLSLTSDAPFLSDYQDEGMEDIVKGAQELDNVIKQGYLEKKSKDHSFFGSEWQKRWCVVSRGLFYYYANEKSKQPKGTFLIKGYGVRMAPHLRRDSKKESCFELTSQDRRSYEFTATSPAEARDWVDQISFLLKDLSSLTIPYEEDEEEEEKEETYDDIDGFDSPSCGSQCRPTILPGSVGIKEPTEEKEEEDIYEVLPDEEHDLEEDESGTRRKGVDYASYYQGLWDCHGDQPDELSFQRGDLIRILSKEYNMYGWWVGELNSLVGIVPKEYLTTAFEVEER

SEQ ID NO: 337 - protein, 470 aa, homo sapiens
MSLLGRDYNSELNSLDNGPQSPSESSSSITSENVHPAGEAGLSMMQTLIHLLKCNIGTGLLGLPLAIKNAGLLVGPVSLLAIGVLTVHCMVILLNCAQHLSQRLQKTFVNYGEATMYGLETCPNTWLRAHAVWGRYTVSFLLVITQLGFCSVYFMFMADNLQQMVEKAHVTSNICQPREILTLTPILDIRFYMLIILPFLILLVFIQNLKVLSVFSTLANITTLGSMALIFEYIMEGIPYPSNLPLMANWKTFLLFFGTAIFTFEGVGMVLPLKNQMKHPQQFSFVLYLGMSIVIILYILLGTLGYMKFGSDTQASITLNLPNCWLYQSVKLMYSIGIFFTYALQFHVPAEIIIPFAISQVSESWALFVDLSVRSALVCLTCVSAILIPRLDLVISLVGSVSSSALALIIPALLEIVIFYSEDMSCVTIAKDIMISIVGLLGCIFGTYQALYELPQPISHSMANSTGVHA

SEQ ID NO: 338 - protein, 973 aa, homo sapiens
MYNMRRLSLSPTFSMGFHLLVTVSLLFSHVDHVIAETEMEGEGNETGECTGSYYCKKGVILPIWEPQDPSFGDKIARATVYFVAMVYMFLGVSIIADRFMSSIEVITSQEKEITIKKPNGETTKTTVRIWNETVSNLTLMALGSSAPEILLSVIEVCGHNFTAGDLGPSTIVGSAAFNMFIIIALCVYVVPDGETRKIKHLRVFFVTAAWSIFAYTWLYIILSVISPGVVEVWEGLLTFFFFPICVVFAWVADRRLLFYKYVYKRYRAGKQRGMIIEHEGDRPSSKTEIEMDGKVVNSHVENFLDGALVLEVDERDQDDEEARREMARILKELKQKHPDKEIEQLIELANYQVLSQQQKSRAFYRIQATRLMTGAGNILKRHAADQARKAVSMHEVNTEVTENDPVSKIFFEQGTYQCLENCGTVALTIIRRGGDLTNTVFVDFRTEDGTANAGSDYEFTEGTVVFKPGDTQKEIRVGIIDDDIFEEDENFLVHLSNVKVSSEASEDGILEANHVSTLACLGSPSTATVTIFDDDHAGIFTFEEPVTHVSESIGIMEVKVLRTSGARGNVIVPYKTIEGTARGGGEDFEDTCGELEFQNDEIVKTISVKVIDDEEYEKNKTFFLEIGEPRLVEMSEKKALLLNELGGFTITGKYLFGQPVFRKVHAREHPILSTVITIADEYDDKQPLTSKEEEERRIAEMGRPILGEHTKLEVIIEESYEFKSTVDKLIKKTNLALVVGTNSWREQFIEAITVSAGEDDDDDECGEEKLPSCFDYVMHFLTVFWKVLFAFVPPTEYWNGWACFIVSILMIGLLTAFIGDLASHFGCTIGLKDSVTAVVFVALGTSVPDTFASKVAATQDQYADASIGNVTGSNAVNVFLGIGVAWSIAAIYHAANGEQFKVSPGTLAFSVTLFTIFAFINVGVLLYRRRPEIGGELGGPRTAKLLTSCLFVLLWLLYIFFSSLEAYCHIKGF

SEQ ID NO: 339 - protein, 724 aa, homo sapiens
MKSAKGIENLAFVPSSPDILRRLSASPSQIEVSALSSDPQRENSQPQELQKPQEPQKSPEPSLPSAPPNVSEEKLRSLSLSEFEEGSYGWRNFHPQCLQRCNTPGGFLLHYCLLAVTQGIVVNGLVNISISTVEKRYEMKSSLTGLISSSYDISFCLLSLFVSFFGERGHKPRWLAFAAFMIGLGALVFSLPQFFSGEYKLGSLFEDTCVTTRNSTSCTSSTSSLSNYLYVFILGQLLLGAGGTPLYTLGTAFLDDSVPTHKSSLYIGTGYAMSILGPAIGYVLGGQLLTIYIDVAMGESTDVTEDDPRWLGAWWIGFLLSWIFAWSLIIPFSCFPKHLPGTAEIQAGKTSQAHQSNSNADVKFGKSIKDFPAALKNLMKNAVFMCLVLSTSSEALITTGFATFLPKFIENQFGLTSSFAATLGGAVLIPGAALGQILGGFLVSKFRMTCKNTMKFALFTSGVALTLSFVFMYAKCENEPFAGVSESYNGTGELGNLIAPCNANCNCSRSYYYPVCGDGVQYFSPCFAGCSNPVAHRKPKVYYNCSCIERKTEITSTAETFGFEAKAGKCETHCAKLPIFLCIFFIVIIFTFMAGTPITVSILRCVNHRQRSLALGIQFMVLRLLGTIPGPIIFGFTIDSTCILWDINDCGIKGACWIYDNIKMAHMLVAISVTCKVITMFFNGFAIFLYKPPPSATDVSFHKENAVVTNVLAEQDLNKIVKEG

SEQ ID NO: 340 - protein, 238 aa, homo sapiens
MSEDLAKQLASYKAQLQQVEAALSGNGENEDLLKLKKDLQEVIELTKDLLSTQPSETLASSDSFASTQPTHSWKVGDKCMAVWSEDGQCYEAEIEEIDEENGTAAITFAGYGNAEVTPLLNLKPVEEGRKAKEDSGNKPMSKKEMIAQQREYKKKKALKKAQRIKELEQEREDQKVKWQQFNNRAYSKNKKGQVKRSIFASPESVTGKVGVGTCGIADKPMTQYQDTSKYNVRHLMPQ

SEQ ID NO: 341 - protein, 436 aa, homo sapiens
MLKVSAVLCVCAAAWCSQSLAAAAAVAAAGGRSDGGNFLDDKQWLTTISQYDKEVGQWNKFRDEVEDDYFRTWSPGKPFDQALDPAKDPCLKMKCSRHKVCIAQDSQTAVCISHRRLTHRMKEAGVDHRQWRGPILSTCKQCPVVYPSPVCGSDGHTYSFQCKLEYQACVLGKQISVKCEGHCPCPSDKPTSTSRNVKRACSDLEFREVANRLRDWFKALHESGSQNKKTKTLLRPERSRFDTSILPICKDSLGWMFNRLDTNYDLLLDQSELRSIYLDKNEQCTKAFFNSCDTYKDSLISNNEWCYCFQRQQDPPCQTELSNIQKRQGVKKLLGQYIPLCDEDGYYKPTQCHGSVGQCWCVDRYGNEVMGSRINGVADCAIDFEISGDFASGDFHEWTDDEDDEDDIMNDEDEIEDDDEDEGDDDDGGDDHDVYI

SEQ ID NO: 342 - protein, 406 aa, homo sapiens
MIHTNLKKKFSCCVLVFLLFAVICVWKEKKKGSYYDSFKLQTKEFQVLKSLGKLAMGSDSQSVSSSSTQDPHRGRQTLGSLRGLAKAKPEASFQVWNKDSSSKNLIPRLQKIWKNYLSMNKYKVSYKGPGPGIKFSAEALRCHLRDHVNVSMVEVTDFPFNTSEWEGYLPKESIRTKAGPWGRCAVVSSAGSLKSSQLGREIDDHDAVLRFNGAPTANFQQDVGTKTTIRLMNSQLVTTEKRFLKDSLYNEGILIVWDPSVYHSDIPKWYQNPDYNFFNNYKTYRKLHPNQPFYILKPQMPWELWDILQEISPEEIQPNPPSSGMLGIIIMMTLCDQVDIYEFLPSKRKTDVCYYYQKFFDSACTMGAYHPLLYEKNLVKHLNQGTDEDIYLLGKATLPGFRTIHC

SEQ ID NO: 343 - protein, 436 aa, homo sapiens
MDQPFTVNSLKKLAAMPDHTDVSLSPEERVRALSKLGCNITISEDITPRRYFRSGVEMERMASVYLEEGNLENAFVLYNKFITLFVEKLPNHRDYQQCAVPEKQDIMKKLKEIAFPRTDELKNDLLKKYNVEYQEYLQSKNKYKAEILKKLEHQRLIEAERKRIAQMRQQQLESEQFLFFEDQLKKQELARGQMRSQQTSGLSEQIDGSALSCFSTHQNNSLLNVFADQPNKSDATNYASHSPPVNRALTPAATLSAVQNLVVEGLRCVVLPEDLCHKFLQLAESNTVRGIETCGILCGKLTHNEFTITHVIVPKQSAGPDYCDMENVEELFNVQDQHDLLTLGWIHTHPTQTAFLSSVDLHTHCSYQLMLPEAIAIVCSPKHKDTGIFRLTNAGMLEVSACKKKGFHPHTKEPRLFSICKHVLVKDIKIIVLDLR

SEQ ID NO: 344 - protein, 278 aa, homo sapiens
MDKSGIDSLDHVTSDAVELANRSDNSSDSSLFKTQCIPYSPKGEKRNPIRKFVRTPESVHASDSSSDSSFEPIPLTIKAIFERFKNRKKRYKKKKKRRYQPTGRPRGRPEGRRNPIYSLIDKKKQFRSRGSGFPFLESENEKNAPWRKILTFEQAVARGFFNYIEKLKYEHHLKESLKQMNVGEDLENEDFDSRRYKFLDDDGSISPIEESTAEDEDATHLEDNECDIKLAGDSFIVSSEFPVRLSVYLEEEDITEEAALSKKRATKAKNTGQRGLKM

SEQ ID NO: 345 - protein, 317 aa, homo sapiens
MGGVIKSIFTFVLIVEFIIGNLGNSFIALVNCIDWVKGRKISSVDRILTALAISRISLVWLIFGSWCVSVFFPALFATEKMFRMLTNIWTVINHFSVWLATGLGTFYFLKIANFSNSIFLYLKWRVKKVVLVLLLVTSVFLFLNIALINIHINASINGYRRNKTCSSDSSNFTRFSSLIVLTSTVFIFIPFTLSLAMFLLLIFSMWKHRKKMQHTVKISGDASTKAHRGVKSVITFFLLYAIFSLSFFISVWTSERLEENLIILSQVMGMAYPSCHSCVLILGNKKLRQASLSVLLWLRYMFKDGEPSGHKEFRESS

SEQ ID NO: 346 - protein, 557 aa, homo sapiens
MDQSRVLLWVKAEPFIVGALQVPPPSKFSLHYLRKISTYVQIRATEGAYPRLYWSTWRHIACGKLQLAKDLAWLYFEIFDSLSMKTPEERLEWSEVLSNCMSEEEVEKQRNQLSVDTLQFLLFLYIQQLNKVSLRTSLIGEEWPSPRNKSQSPDLTEKSNCHNKNWNDYSHQAFVYDHLSDLLELLLDPKQLTASFHSTHSSLVSREAVVALSFLIEGTISRARKIYPLHELALWQPLHADSGFSKISKTFSFYKLETWLRSCLTGNPFGTSACLKSGKKLAWAHQVEGTTKRAKIACNTHVAPRMHRLVVMSQVYKQTLAKSSDTLAGAHVKIHRCNESFIYLLSPLRSVTIEKCRNSIFVLGPVGTTLHLHSCDNVKVIAVCHRLSISSTTGCIFHVLTPTRPLILSGNQTVTFAPFHTHYPMLEDHMARTGLATVPNYWDNPMVVCRENSDTRVFQLLPPCEFYVFIIPFEMEGDTTEIPGGLPSVYQKALGQREQKIQIWQKTVKEAHLTKDQRKQFQVLVENKFYEWLINTGHRQQLDSLVPPAAGSKQAAG

SEQ ID NO: 347 - protein, 753 aa, homo sapiens
MAAGSTTLHAVEKLQVRLATKTEPKKLEKYLQKLSALPMTADILAETGIRKTVKRLRKHQHVGDFARDLAARWKKLVLVDRNTRPGPQDPEESASRQRFGEALQDQEKAWGFPENATAPRSPSHSPEHRRTARRTPPGQQRPHPRSHSREPRAERKCPRIAPADSGRYRASPTRTAPLRMPEGPEPAAPGKQPGRGHTHAAQGGPLLCPGCQGQPQGKAVVSHSKGHKSSRQEKRPLCAQGDWHSPTLIREKSCGACLREETPRMPSWASARDRQPSDFKTDKEGGQAGSGQRVPALEEAPDSHQKRPQHSHSNKKRPSLDGRDPGNGTHGLSPEEKEQLSNDRETQEGKPPTAHLDRTSVSSLSEVEEVDMAEEFEQPTLSCEKYLTYDQLRKQKKKTGKSATTALGDKQRKANESKGTRESWDSAKKLPPVQESQSERLQAAGADSAGPKTVPSHVFSELWDLSEAWMQANYDPLSDSDSMTSQAKPEALSSPKFREEAAFPGRRVNAKMPVYSGSRPACQLQVPTLRQQCAQVLRNNPDALSDVGEVPYWVLEPVLEGWRPDQLYRRKKDNHALVRETDELRRNHCFQDFKEEKPQENKTWREQYLRLPDAPEQRLRVMTTNIRSARGNNPNGREAKMICFKSVAKTPYDTSRRQEKSAGDADPENGEIKPASKPAGSSHTPSSQSSSGGGRDSSSSILRWLPEKRANPCLSSSNEHAAPAAKTRKQAAKKVAPLMAKAIRDYKRRFSRR

SEQ ID NO: 348 - protein, 134 aa, homo sapiens
MTEEPIKEILGAPKAHMAATMEKSPKSEVVITTVPLVSEIQLMAATGGTELSCYRCIIPFAVVVFIAGIVVTAVAYSFNSHGSIISIFGLVVLSSGLFLLASSALCWKVRQRSKKAKRRESQTALVANQRSLFA

SEQ ID NO: 349 - protein, 262 aa, homo sapiens
MAWKSSVIMQMGRFLLLVILFLPREMTSSVLTVNGKTENYILDTTPGSQASLICAVQNHTREEELLWYREEGRVDLKSGNKINSSSVCVSSISENDNGISFTCRLGRDQSVSVSVVLNVTFPPLLSGNDFQTVEEGSNVKLVCNVKANPQAQMMWYKNSSLLDLEKSRHQIQQTSESFQLSITKVEKPDNGTYSCIAKSSLKTESLDFHLIVKDKTVGVPIEPIIAACVVIFLTLCFGLIARRKKIMKLCMKDKDPHSETAL

SEQ ID NO: 350 - protein, 344 aa, homo sapiens
MQLEIKVALNFIISYLYNKLPRRRADLFGEELERLLKKKYEGHWYPEKPLKGSGFRCVHIGEMVDPVVELAAKRSGLAVEDVRANVPEELSVWIDPFEVSYQIGEKGAVKVLYLDDSEGCGAPELDKEIKSSFNPDAQVFVPIGSQDSSLSNSPSPSFGQSPSPTFIPRSAQPITFTTASFAATKFGSTKMKKGGGAASGGGVASSGAGGQQPPQQPRMARSPTNSLLKHKSLSLSMHSLNFITANPAPQSQLSPNAKEFVYNGGGSPSLFFDAADGQGSGTPGPFGGSGAGTCNSSSFDMAQVFGGGANSLFLEKTPFVEGLSYNLNTMQYPSQQFQPVVLAN

SEQ ID NO: 351 - protein, 444 aa, homo sapiens
MREIVLTQIGQCGNQIGAKFWEVISDEHAIDSAGTYHGDSHLQLERINVYYNEASGGRYVPRAVLVDLEPGTMDSVRSGPFGQVFRPDNFIFGQCGAGNNWAKGHYTEGAELMESVMDVVRKEAESCDCLQGFQLTHSLGGGTGSGMGTLLLSKIREEYPDRIINTFSILPSPKVSDTVVEPYNATLSVHQLIENADETFCIDNEALYDICSKTLKLPTPTYGDLNHLVSATMSGVTTCLRFPGQLNADLRKLAVNMVPFPRLHFFMPGFAPLTSRGSQQYRALTVAELTQQMFDAKNMMAACDPRHGRYLTAAAIFRGRMPMREVDEQMFNIQDKNSSYFADWLPNNVKTAVCDIPPRGLKMSATFIGNNTAIQELFKRVSEQFTAMFRRKAFLHWYTGEGMDEMEFTEAESNMNDLVSEYQQYQDATAEEEEDEEYAEEEVA

SEQ ID NO: 352 - protein, 165 aa, homo sapiens
MAPNASCLCVHVRSEEWDLMTFDANPYDSVKKIKEHVRSKTKVPVQDQVLLLGSKILKPRRSLSSYGIDKEKTIHLTLKVVKPSDEELPLFLVESGDEAKRHLLQVRRSSSVAQVKAMIETKTGIIPETQIVTCNGKRLEDGKMMADYGIRKGNLLFLACYCIGG

SEQ ID NO: 353 - protein, 530 aa, homo sapiens
MSLKWMSVFLLMQLSCYFSSGSCGKVLVWPTEYSHWINMKTILEELVQRGHEVIVLTSSASILVNASKSSAIKLEVYPTSLTKNDLEDFFMKMFDRWTYSISKNTFWSYFSQLQELCWEYSDYNIKLCEDAVLNKKLMRKLQESKFDVLLADAVNPCGELLAELLNIPFLYSLRFSVGYTVEKNGGGFLFPPSYVPVVMSELSDQMIFMERIKNMIYMLYFDFWFQAYDLKKWDQFYSEVLGRPTTLFETMGKAEMWLIRTYWDFEFPRPFLPNVDFVGGLHCKPAKPLPKEMEEFVQSSGENGIVVFSLGSMISNMSEESANMIASALAQIPQKVLWRFDGKKPNTLGSNTRLYKWLPQNDLLGHPKTKAFITHGGTNGIYEAIYHGIPMVGIPLFADQHDNIAHMKAKGAALSVDIRTMSSRDLLNALKSVINDPIYKENIMKLSRIHHDQPVKPLDRAVFWIEFVMRHKGAKHLRVAAHNLTWIQYHSLDVIAFLLACVATMIFMITKCCLFCFRKLAKTGKKKKRD

SEQ ID NO: 354 - protein, 274 aa, homo sapiens
MLSVASRSGPFAPVLSATSRGVAGALRPLVQATVPATPEQPVLDLKRPFLSRESLSGQAVRRPLVASVGLNVPASVCYSHTDIKVPDFSEYRRLEVLDSTKSSRESSEARKGFSYLVTGVTTVGVAYAAKNAVTQFVSSMSASADVLALAKIEIKLSDIPEGKNMAFKWRGKPLFVRHRTQKEIEQEAAVELSQLRDPQHDLDRVKKPEWVILIGVCTHLGCVPIANAGDFGGYYCPCHGSHYDASGRIRLGPAPLNLEVPTYEFTSDDMVIVG

SEQ ID NO: 355 - protein, 513 aa, homo sapiens
MTTQLPAYVAILLFYVSRASCQDTFTAAVYEHAAILPNATLTPVSREEALALMNRNLDILEGAITSAADQGAHIIVTPEDAIYGWNFNRDSLYPYLEDIPDPEVNWIPCNNRNRFGQTPVQERLSCLAKNNSIYVVANIGDKKPCDTSDPQCPPDGRYQYNTDVVFDSQGKLVARYHKQNLFMGENQFNVPKEPEIVTFNTTFGSFGIFTCFDILFHDPAVTLVKDFHVDTIVFPTAWMNVLPHLSAVEFHSAWAMGMRVNFLASNIHYPSKKMTGSGIYAPNSSRAFHYDMKTEEGKLLLSQLDSHPSHSAVVNWTSYASSIEALSSGNKEFKGTVFFDEFTFVKLTGVAGNYTVCQKDLCCHLSYKMSENIPNEVYALGAFDGLHTVEGRYYLQICTLLKCKTTNLNTCGDSAETASTRFEMFSLSGTFGTQYVFPEVLLSENQLAPGEFQVSTDGRLFSLKPTSGPVLTVTLFGRLYEKDWASNASSGLTAQARIIMLIVIAPIVCSLSW

SEQ ID NO: 356 - protein, 502 aa, homo sapiens
MAAPCEGQAFAVGVEKNWGAVVRSPEGTPQKIRQLIDEGIAPEEGGVDAKDTSATSQSVNGSPQAEQPSLESTSKEAFFSRVETFSSLKWAGKPFELSPLVCAKYGWVTVECDMLKCSSCQAFLCASLQPAFDFDRYKQRCAELKKALCTAHEKFCFWPDSPSPDRFGMLPLDEPAILVSEFLDRFQSLCHLDLQLPSLRPEDLKTMCLTEDKISLLLHLLEDELDHRTDERKTTIKLGSDIQVHVTACILSVCGWACSSSLESMQLSLITCSQCMRKVGLWGFQQIESSMTDLDASFGLTSSPIPGLEGRPERLPLVPESPRRMMTRSQDATFSPGSEQAEKSPGPIVSRTRSWDSSSPVDRPEPEAASPTTRTRPVTRSMGTGDTPGLEVPSSPLRKAKRARLCSSSSSDTSSRSFFDPTSQHRDWCPWVNITLGKESRENGGTEPDASAPAEPGWKAVLTILLAHKQSSQPAETDSMSLSEKSRKVFRIFRQWESLCSC

SEQ ID NO: 357 - protein, 402 aa, homo sapiens
MASIIARVGNSRRLNAPLPPWAHSMLRSLGRSLGPIMASMADRNMKLFSGRVVPAQGEETFENWLTQVNGVLPDWNMSEEEKLKRLMKTLRGPAREVMRVLQATNPNLSVADFLRAMKLVFGESESSVTAHGKFFNTLQAQGEKASLYVIRLEVQLQNAIQAGIIAEKDANRTRLQQLLLGGELSRDLRLRLKDFLRMYANEQERLPNFLELIRMVREEEDWDDAFIKRKRPKRSESMVERAVSPVAFQGSPPIVIGSADCNVIEIDDTLDDSDEDVILVESQDPPLPSWGAPPLRDRARPQDEVLVIDSPHNSRAQFPSTSGGSGYKNNGPGEMRRARKRKHTIRCSYCGEEGHSKETCDNESDKAQVFENLIITLQELTHTEMERSRVAPGEYNDFSEPL

SEQ ID NO: 358 - protein, 451 aa, homo sapiens
MAKLYEAVTFKDVAVIFTEEELGLLDPAQRKLYRDVMLENFRNLLSVGGKIQTEMETVPEAGTHEEFSCKQIWEQIASDLTRSQDTTISNSQLFEQDDNPSQIKARLSTVHTREKPFQGENCKQFFSDVSFFDLPQQLYSGEKSHTCDECGKSFCYISALHIHQRVHMGVKCYKCDVCGKEFSQSSRLQTHQRVHTGEKPFKCEQCGKGFRCRSALKVHCKLHMREKPYNCEKCGKAFMHNFQLQKHHRIHTGEKPFKCEICGKSFCLRSSLNRHCMVHTAEKLYKSEKYGRGFIDRLDLHKHQMIHMGQKPYNCKECGKSFKWSSYLLVHQRVHTGEKPYKCEECGKGYISKSGLDFHHRTHTGERSYNCDNCGKSFRHASSILNHKKLHCQRKPLKCEDCGKRLVCRSYCKDQQRDHSGENPSKCEDCGKRYKRRLNLDIILSLFLNDI

SEQ ID NO: 359 - protein, 459 aa, homo sapiens
MAASGAVEPGPPGAAVAPSPAPAPPPAPDHLFRPISAEDEEQQPTEIESLCMNCYCNGMTRLLLTKIPFFREIIVSSFSCEHCGWNNTEIQSAGRIQDQGVRYTLSVRALEDMNREVVKTDSAATRIPELDFEIPAFSQKGALTTVEGLITRAISGLEQDQPARRANKDATAERIDEFIVKLKELKQVASPFTLIIDDPSGNSFVENPHAPQKDDALVITHYNRTRQQEEMLGLQEEAPAEKPEEEDLRNEVLQFSTNCPECNAPAQTNMKLVQIPHFKEVIIMATNCENCGHRTNEVKSGGAVEPLGTRITLHITDASDMTRDLLKSETCSVEIPELEFELGMAVLGGKFTTLEGLLKDIRELVTKNPFTLGDSSNPGQTERLQEFSQKMDQIIEGNMKAHFIMDDPAGNSYLQNVYAPEDDPEMKVERYKRTFDQNEELGLNDMKTEGYEAGLAPQR

SEQ ID NO: 360 - protein, 499 aa, homo sapiens
MLSLSPILLYTCEMFQDPVAFKDVAVNFTQEEWALLDISQKNLYREVMLETFWNLTSIGKKWKDQNIEYEYQNPRRNFRSVTEEKVNEIKEDSHCGETFTPVPDDRLNFQKKKASPEVKSCDSFVCEVGLGNSSSNMNIRGDTGHKACECQEYGPKPWKSQQPKKAFRYHPSLRTQERDHTGKKPYACKECGKNIIYHSSIQRHMVVHSGDGPYKCKFCGKAFHCLSLYLIHERTHTGEKPYECKQCGKSFSYSATHRIHERTHIGEKPYECQECGKAFHSPRSCHRHERSHMGEKAYQCKECGKAFMCPRYVRRHERTHSRKKLYECKQCGKALSSLTSFQTHIRMHSGERPYECKTCGKGFYSAKSFQRHEKTHSGEKPYKCKQCGKAFTRSGSFRYHERTHTGEKPYECKQCGKAFRSAPNLQLHGRTHTGEKPYQCKECGKAFRSASQLRIHRRIHTGEKPYECKKCGKAFRYVQNFRFHERTQTHKNALWRKTL

SEQ ID NO: 361 - protein, 686 aa, homo sapiens
MTESQGTVTFKDVAIDFTQEEWKRLDPAQRKLYRNVMLENYNNLITVGYPFTKPDVIFKLEQEEEPWVMEEEVLRRHWQGEIWGVDEHQKNQDRLLRQVEVKFQKTLTEEKGNECQKKFANVFPLNSDFFPSRHNLYEYDLFGKCLEHNFDCHNNVKCLMRKEHCEYNEPVKSYGNSSSHFVITPFKCNHCGKGFNQTLDLIRHLRIHTGEKPYECSNCRKAFSHKEKLIKHYKIHSREQSYKCNECGKAFIKMSNLIRHQRIHTGEKPYACKECEKSFSQKSNLIDHEKIHTGEKPYECNECGKAFSQKQSLIAHQKVHTGEKPYACNECGKAFPRIASLALHMRSHTGEKPYKCDKCGKAFSQFSMLIIHVRIHTGEKPYECNECGKAFSQSSALTVHMRSHTGEKPYECKECRKAFSHKKNFITHQKIHTREKPYECNECGKAFIQMSNLVRHQRIHTGEKPYICKECGKAFSQKSNLIAHEKIHSGEKPYECNECGKAFSQKQNFITHQKVHTGEKPYDCNECGKAFSQIASLTLHLRSHTGEKPYECDKCGKAFSQCSLLNLHMRSHTGEKPYVCNECGKAFSQRTSLIVHMRGHTGEKPYECNKCGKAFSQSSSLTIHIRGHTGEKPFDCSKCGKAFSQISSLTLHMRKHTGEKPYHCIECGKAFSQKSHLVRHQRIHTH

SEQ ID NO: 362 - protein, 525 aa, homo sapiens
MGTISLCIGVCAFEGANTSTSFYKLVYTAILSYSIQDLLPEQDMKDLCQKVTLTRHRSWGLDNLHLVKDWRTVNEGKGQKEYCNRLTQCSSTKSKIFQCIECGRNFSWRSILTEHKRIHTGEKPYKCEECGKVFNRCSNLTKHKRIHTGEKPYKCDECGKVFNWWSQLTNHKKIHTGEKPYKCDECDKVFNWWSQLTSHKKIHSGEKPYPCEECGKAFTQFSNLTQHKRIHTGEKPYKCKECCKAFNKFSNLTQHKRIHTGEKPYKCEECGNVFNECSHLTRHRRIHTGEKPYKCEECGKAFTQFASLTRHKRIHTGEKPYQCEECGKTFNRCSHLSSHKRIHTGEKPYKCEECGRTFTQFSNLTQHKRIHTGEKPYKCKECGKAFNKFSSLTQHRRIHTGVKPYKCEECGKVFKQCSHLTSHKRIHTGEKPYKCKECGKAFYQSSILSKHKRIHTEEKPYKCEECGKAFNQFSSLTRHKRIHTGEKRYKCKECGKGFYQSSIHSKYKRIYTGEEPDKCKKCGSL

SEQ ID NO: 363 - protein, 378 aa, homo sapiens
MISFQESVTFQDVAVDFTAEEWQLLDCAERTLYWDVMLENYRNLISVGCPITKTKVILKVEQGQEPWMVEGANPHESSPESDYPLVDEPGKHRESKDNFLKSVLLTFNKILTMERIHHYNMSTSLNPMRKKSYKSFEKCLPPNLDLLKYNRSYTVENAYECSECGKAFKKKFHFIRHEKNHTRKKPFECNDCGKAYSRKAHLATHQKIHNGERPFVCNDCGKAFMHKAQLVVHQRLHTGEKPYECSQCGKTFTWNSSFNQHVKSHTLEKSFECKECGKTFRYSSSLYKHSRFHTGEKPYQCIICGKAFGNTSVLVTHQRIHTGEKPYSCIECGKAFIKKSHLLRHQITHTGEKPYECNRCGKAFSQKSNLIVHQKIHT

SEQ ID NO: 364 - protein, 495 aa, homo sapiens
MAKRPGPPGSREMGLLTFRDIAIEFSLAEWQCLDHAQQNLYRDVMLENYRNLVSLGIAVSKPDLITCLEQNKEPQNIKRNEMVAKHPVTCSHFTQDLQSEQGIKDSLQKVILRRYGKCGQEDLQVKKCCKSVGECEVHKGGYNYVNQCLSATQNKTFQTHKCVKVFGKFSNSNRHKTRHTGKKHFKCKNDGKSFCMLSRLNQHQIIHTREKSYKCEECGKSFNCSSTLTRHKRIHTGEKPYRCEECGKAFSWSASLTKHKRIHTGEKPYTCEERGKVFSRSTLTNYKRIHTGEKPYTCEECGKAFSRSSTLTNHKRIHTGERPYKCEECGKAFSLSSTLKKHKIVHTGEKLYTCEECGKAFTFSSTLNTHKRIHTGEKPYTCEECGKAFSLPSTFTYHKRTHTGEKPYKCEECGKAFNCSSTLKKHKIIHTGEKLYKCKECGKAFTFSSTLNTHKRIHTGEKPYKCEECDQTFKWHSSLANHKNMHTGEKPYKYE

SEQ ID NO: 365 - protein, 478 aa, homo sapiens
MELLTFKDVAIEFSPEEWKCLDISQQNLYRDVMLENYRNLVSLGVTISNPDLVTSLEQRKEPYNLKIHETAARPPAVCSHFTQNLWTVQGIEDSFHKLIPKGHEKRGHENLRKTCKSINECKVQKGGYNRINQCLLTTQKKTIQSNICVKVFHKFSNSNKDKIRYTGDKTFKCKECGKSFHVLSRLTQHKRIHTGENPYTCEECGKAFNWSSILTKHKRIHAREKFYKCEECGKGFTRSSHLTKHKRIHTGEKPYICEKCGKAFNQSSTLNLHKRIHSAQKYYKCEECGKAFKWSSSLNEHKRIHAGEKPFSCEECGNVFTTSSDFAKHKRIHTGEKPYKCEECGKSFNRSTTLTTHKRIHTGEKPYTCEECGKAFNWSSTLNVHKRIHSGKNPYKCEDCGKAFKVFANLHNRKKIHTGEKPYICKQCGKAFKQSSHLNKHKKIHTVDKPYKCKECGKAFKQYSNLPQHKRTHTGGKF

SEQ ID NO: 366 - protein, 936 aa, homo sapiens
MRPRSGGRPGATGRRRRRLRRRPRGLRCSRLPPPPPLPLLLGLLLAAAGPGAARAKETAFVEVVLFESSPSGDYTTYTTGLTGRFSRAGATLSAEGEIVQMHPLGLCNNNDEEDLYEYGWVGVVKLEQPELDPKPCLTVLGKAKRAVQRGATAVIFDVSENPEAIDQLNQGSEDPLKRPVVYVKGADAIKLMNIVNKQKVARARIQHRPPRQPTEYFDMGIFLAFFVVVSLVCLILLVKIKLKQRRSQNSMNRLAVQALEKMETRKFNSKSKGRREGSCGALDTLSSSSTSDCAICLEKYIDGEELRVIPCTHRFHRKCVDPWLLQHHTCPHCRHNIIEQKGNPSAVCVETSNLSRGRQQRVTLPVHYPGRVHRTNAIPAYPTRTSMDSHGNPVTLLTMDRHGEQSLYSPQTPAYIRSYPPLHLDHSLAAHRCGLEHRAYSPAHPFRRPKLSGRSFSKAACFSQYETMYQHYYFQGLSYPEQEGQSPPSLAPRGPARAFPPSGSGSLLFPTVVHVAPPSHLESGSTSSFSCYHGHRSVCSGYLADCPGSDSSSSSSSGQCHCSSSDSVVDCTEVSNQGVYGSCSTFRSSLSSDYDPFIYRSRSPCRASEAGGSGSSGRGPALCFEGSPPPEELPAVHSHGAGRGEPWPGPASPSGDQVSTCSLEMNYSSNSSLEHRGPNSSTSEVGLEASPGAAPDLRRTWKGGHELPSCACCCEPQPSPAGPSAGAAGSSTLFLGPHLYEGSGPAGGEPQSGSSQGLYGLHPDHLPRTDGVKYEGLPCCFYEEKQVARGGGGGSGCYTEDYSVSVQYTLTEEPPPGCYPGARDLSQRIPIIPEDVDCDLGLPSDCQGTHSLGSWGGTRGPDTPRPHRGLGATREEERALCCQARALLRPGCPPEEAGAVRANFPSALQDTQESSTTATEAAGPRSHSADSSSPGA

SEQ ID NO: 367 - protein, 852 aa, homo sapiens
MMAKSALRENGTNSETFRQRFRRFHYQEVAGPREAFSQLWELCCRWLRPEVRTKEQIVELLVLEQFLTVLPGEIQNWVQEQCPENGEEAVTLVEDLEREPGRPRSSVTVSVKGQEVRLEKMTPPKSSQELLSVRQESVEPQPRGVPKKERARSPDLGPQEQMNPKEKLKPFQRSGLPFPKSGVVSRLEQGEPWIPDLLGSKEKELPSGSHIGDRRVHADLLPSKKDRRSWVEQDHWSFEDEKVAGVHWGYEETRTLLAILSQTEFYEALRNCHRNSQVYGAVAERLREYGFLRTLEQCRTKFKGLQKSYRKVKSGHPPETCPFFEEMEALMSAQVIALPSNGLEAAASHSGLVGSDAETEEPGQRGWQHEEGAEEAVAQESDSDDMDLEATPQDPNSAAPVVFRSPGGVHWGYEETKTYLAILSETQFYEALRNCHRNSQLYGAVAERLWEYGFLRTPEQCRTKFKSLQTSYRKVKNGQAPETCPFFEEMDALVSVRVAAPPNDGQEETASCPVQGTSEAEAQKQAEEADEATEEDSDDDEEDTEIPPGAVITRAPVLFQSPRGFEAGFENEDNSKRDISEEVQLHRTLLARSERKIPRYLHQGKGNESDCRSGRQWAKTSGEKRGKLTLPEKSLSEVLSQQRPCLGERPYKYLKYSKSFGPNSLLMHQVSHQVENPYKCADCGKSFSRSARLIRHRRIHTGEKPYKCLDCGKSFRDSSNFITHRRIHTGEKPYQCGECGKCFNQSSSLIIHQRTHTGEKPYQCEECGKSFNNSSHFSAHRRIHTGERPHVCPDCGKSFSKSSDLRAHHRTHTGEKPYGCHDCGKCFSKSSALNKHGEIHAREKLLTQSAPK
